(19) United States
(12) Patent Application Publication
(10) Pub. No.: US 2006/0141462 A1
(43) Pub. Date: Jun. 29, 2006

(54) Human type II diabetes gene-slit-3 located on chromosome 5q35

(76) Inventors: Inga Reynisdottir, Reykjavik (IS); Jeffrey R. Gulcher, Lake Barrington, IL (US); Struan F. Grant, Reykjavik (IS); Gudmar Thorleifsson, Reykjavik (IS)

Correspondence Address: HAMILTON, BROOK, SMITH & REYNOLDS, P.C., 530 VIRGINIA ROAD, P.O. BOX 9133, CONCORD, MA, 01742-9133, US

(21) Appl. No.: 10/533,365

(22) PCT Filed: Oct. 31, 2003
(86) PCT No.: PCT/US03/34801

§ 371 Date: Nov. 9, 2005

Related U.S. Application Data
(60) Provisional application No. 60/423,541, filed on Nov. 1, 2002.

(51) Int. Cl. C12Q 1/68

(52) U.S. Cl. 435/6

(57) ABSTRACT

Association of Type II diabetes and a locus on chromosome 5q35 is disclosed. In particular, the gene SLIT-3 with this locus is shown by linkage analysis to be a susceptibility gene for Type II diabetes. Pathway targeting for drug delivery and diagnosis applications in identifying those have Type II diabetes or at risk of developing Type II diabetes, in particular those that are non-obese are described.

### RELATED APPLICATION

[0001] This application claims the benefit of U.S. Provisional Application No. 60/423,541, filed on Nov. 1, 2002. The entire teachings of the above application are incorporated herein by reference.

### BACKGROUND OF THE INVENTION

[0002] Diabetes mellitus, a metabolic disease in which carbohydrate utilization is reduced and lipid and protein utilization is enhanced, is caused by an absolute or relative deficiency of insulin. In the more severe cases, diabetes is characterized by chronic hyperglycemia, glycosuria, water and electrolyte loss, ketoacidosis and coma. Long term complications include development of neuropathy, retinopathy, nephropathy, generalized degenerative changes in large and small blood vessels and increased susceptibility to infection. The most common form of diabetes is Type II, non-insulin-dependent diabetes which is characterized by hyperglycemia due to impaired insulin secretion and insulin resistance in target tissues. Both genetic and environmental factors contribute to the disease. For example, obesity plays a major role in the development of the disease. Type II diabetes is often a mild form of diabetes mellitus of gradual onset.

[0003] The health implications of Type II diabetes are enormous. In 1995, there were 135 million adults with diabetes worldwide. It is estimated that close to 300 million will have diabetes in the year 2025. (King H., et al., Diabetes Care, 21(9): 1414-1431 (1998)). The prevalence of Type II diabetes in the adult population in Iceland is 2.5% (Vilbergsson, S., et al., Diabet. Med., 14(6): 491-498 (1997)), which comprises approximately 5,000 people over the age of 34 who have the disease.

### SUMMARY OF THE INVENTION

[0004] As described herein, a locus on chromosome 5q35 has been demonstrated which plays a major role in Type II diabetes. The locus, referred to as the Type II diabetes locus, comprises a nucleic acid that encodes, SLIT-3.

[0005] The present invention relates to genes located within the Type II diabetes-related locus, particularly nucleic acids comprising the SLIT-3 gene, and the amino acids encoded by these nucleic acids. The invention further relates to pathway targeting for drug delivery and diagnosis in identifying those who have Type II diabetes and those at risk of developing Type II diabetes. Also, described are a haplotype and SNPs that can be used to identify individuals with Type II diabetes or at risk of developing Type II diabetes, particularly in those that are non-obese. As a consequence, intervention can be prescribed to these individuals before symptoms of the disease present, e.g., dietary changes, exercise and/or medication. Identification of genes in the Type II diabetes locus can pave the way for a better understanding of the disease process, which in turn can lead to improved diagnostics and therapeutics.

[0006] The present invention pertains to methods of diagnosing a susceptibility to Type II diabetes in an individual, comprising detecting a polymorphism in a SLIT-3 nucleic acid, wherein the presence of the polymorphism in the nucleic acid is indicative of a susceptibility to Type II diabetes. The invention additionally pertains to methods of diagnosing Type II diabetes in an individual, comprising detecting a polymorphism in a SLIT-3 nucleic acid, wherein the presence of the polymorphism in the nucleic acid is indicative of Type II diabetes. In one embodiment, in diagnosing Type II diabetes or susceptibility to Type U diabetes by detecting the presence of a polymorphism in a SLIT-3 nucleic acid, the presence of the polymorphism in the SLIT-3 nucleic acid can be indicated, for example, by the presence of one or more of the polymorphisms indicated FIG. 11.

[0007] In other embodiments, the invention relates to methods of diagnosing a susceptibility to Type II diabetes in an individual, comprising detecting an alteration in the expression or composition of a polypeptide encoded by a SLIT-3 nucleic acid in a test sample, in comparison with the expression or composition of a polypeptide encoded by a SLIT-3 nucleic acid in a control sample, wherein the presence of an alteration in expression or composition of the polypeptide in the test sample is indicative of a susceptibility to Type II diabetes. The invention additionally relates to a method of diagnosing Type II diabetes in an individual, comprising detecting an alteration in the expression or composition of a polypeptide encoded by a SLIT-3 nucleic acid in a test sample, in comparison with the expression or composition of a polypeptide encoded by SLIT-3 nucleic acid in a control sample, wherein the presence of an alteration in expression or composition of the polypeptide in the test sample is indicative of Type II diabetes.

[0008] The invention also relates to an isolated nucleic acid molecule comprising a SLIT-3 nucleic acid, wherein the SLIT-3 nucleic acid comprises one or more nucleotide sequence(s) selected from the group of nucleic acid sequences as shown in FIG. 10 and the complements of the group of nucleic acid sequences as shown in FIG. 10. In certain embodiments, the nucleotide sequence contains one or more polymorphism(s), such as those shown in FIG. 11. In another embodiment, the invention relates to an isolated nucleic acid molecule which hybridizes under high stringency conditions to a nucleotide sequence selected from the group of nucleic acid sequences as shown in FIG. 10 and the complements of the group of nucleic acid sequences as shown in FIG. 10. In certain embodiments, wherein the nucleotide sequence contains one or more polymorphism(s), such as those shown in FIG. 11.

[0009] Also contemplated by the invention, is a method for assaying for the presence of a first nucleic acid molecule in a sample, comprising contacting said sample with a second nucleic acid molecule, where the second nucleic acid molecule comprises a nucleic acid sequence selected from the group of nucleic acid sequences shown in FIG. 10 and the complements of the nucleic acid sequences shown in FIG. 10, wherein the nucleic acid sequence hybridizes to the first nucleic acid under high stringency conditions. In certain embodiments, the second nucleic acid molecule contains one or more polymorphism(s), such as those shown in FIG. 11.

[0010] The invention also relates to a vector comprising an isolated nucleic acid molecule of the invention (e.g., a sequence as shown in FIG. 10 or the complement of a sequence as shown in FIG. 10) operably linked to a regulatory sequence, as well as to a recombinant host cell comprising the vector. The invention also provides a method for producing a polypeptide encoded by an isolated nucleic acid molecule having a polymorphism, comprising culturing the recombinant host cell under conditions suitable for expression of the nucleic acid molecule.

[0011] Also contemplated by the invention is a method of assaying for the presence of a polypeptide encoded by an isolated nucleic acid molecule of the invention in a sample, the method comprising contacting the sample with an antibody that specifically binds to the encoded polypeptide.

[0012] The invention further pertains to a method of identifying an agent that alters expression of a SLIT-3 nucleic acid, comprising: contacting a solution containing a nucleic acid comprising the promoter region of the SLIT-3 gene operably linked to a reporter gene, with an agent to be tested; assessing the level of expression of the reporter gene in the presence of the agent; and comparing the level of expression of the reporter gene in the presence of the agent with a level of expression of the reporter gene in the absence of the agent; wherein if the level of expression of the reporter gene in the presence of the agent differs, by an amount that is statistically significant, from the level of expression in the absence of the agent, then the agent is an agent that alters expression of the SLIT-3 gene or nucleic acid. An agent identified by this method is also contemplated.

[0013] The invention additionally comprises a method of identifying an agent that alters expression of a SLIT-3 nucleic acid, comprising contacting a solution containing a nucleic acid of the invention or a derivative or fragment thereof, with an agent to be tested; comparing expression of the nucleic acid, derivative or fragment in the presence of the agent with expression of the nucleic acid, derivative or fragment in the absence of the agent; wherein if expression of the nucleic acid, derivative or fragment in the presence of the agent differs, by an amount that is statistically significant, from the expression in the absence of the agent, then the agent is an agent that alters expression of the SLIT-3 nucleic acid. In certain embodiments, the expression of the nucleic acid, derivative or fragment in the presence of the agent comprises expression of one or more splicing variants(s) that differ in kind or in quantity from the expression of one or more splicing variant(s) the absence of the agent. Agents identified by this method are also contemplated.

[0014] Representative agents that alter expression of a SLIT-3 nucleic acid contemplated by the invention include, for example, antisense nucleic acids to a SLIT-3 gene or nucleic acid; a SLIT-3 gene or nucleic acid; a SLIT-3 polypeptide; a SLIT-3 gene or nucleic acid receptor; a SLIT-3 binding agent; a peptidomimetic; a fusion protein; a prodrug thereof; an antibody; and a ribozyme. A method of altering expression of a SLIT-3 nucleic acid, comprising contacting a cell containing a nucleic acid with such an agent is also contemplated.

[0015] The invention further pertains to a method of identifying a polypeptide which interacts with a SLIT-3 polypeptide (e.g., a SLIT-3 polypeptide encoded by a nucleic acid comprising one or more polymorphism(s) indicated in FIG. 11), comprising employing a yeast two-hybrid system using a first vector which comprises a nucleic acid encoding a DNA binding domain and a SLIT-3 polypeptide, splicing variant, or a fragment or derivative thereof, and a second vector which comprises a nucleic acid encoding a transcription activation domain and a nucleic acid encoding a test polypeptide. If transcriptional activation occurs in the yeast two-hybrid system, the test polypeptide is a polypeptide, which interacts with a SLIT-3 polypeptide.

[0016] In certain methods of the invention, a Type II diabetes therapeutic agent is used. The Type II diabetes therapeutic agent can be an agent that alters (e.g., enhances or inhibits) SLIT-3 polypeptide activity and/or SLIT-3 nucleic acid expression, as described herein (e.g., a nucleic acid agonist or antagonist). In another embodiment, a Type II diabetes therapeutic agent is an agent that alters (e.g., enhances or inhibits) polypeptide activity and/or nucleic acid expression of a member of the Robo family (e.g., robo 1, robo 2 or rig-1).

[0017] Type II diabetes therapeutic agents can alter polypeptide activity or nucleic acid expression of a SLIT-3 nucleic acid or member of the Robo family by a variety of means, such as, for example, by providing additional polypeptide or upregulating the transcription or translation of the nucleic acid encoding the SLIT-3 polypeptide or a polypeptide that is a member of the Robo family; by altering posttranslational processing of the polypeptide; by altering transcription of splicing variants; or by interfering with polypeptide activity (e.g., by binding to the polypeptide, or by binding to another polypeptide that interacts with SLIT-3 or a member of the Robo family, such as a SLIT-3 binding agent as described herein or some other binding agent of a member of the Robo family), by altering (e.g., downregulating) the expression, transcription or translation of a nucleic acid encoding SLIT-3 or the member of the Robo family, by altering activity of a polypeptide member of the Robo family; or by altering interaction among SLIT-3 and one or more members of the Robo family. In another embodiment, agents include those that alter metabolism or activity of a Robo family polypeptide (e.g., robo 1, Robo 2 or rig-1), such as Robo family agonists or antagonists, as well as agents that alter activity of a Robo family receptor.

[0018] In a further embodiment, the invention relates to Type II diabetes therapeutic agent, such as an agent selected from the group consisting of: a SLIT-3 nucleic acid or fragment or derivative thereof; a Robo family nucleic acid or fragment or derivative thereof; a polypeptide encoded by a SLIT-3 nucleic acid (e.g., encoded by a SLIT-3 nucleic acid having one or more polymorphism(s) such as those set forth in FIG. 11); a polypeptide encoded by a Robo family gene or nucleic acid; a SLIT-3 receptor; a Robo family receptor, a SLIT-3 binding agent; a Robo family binding agent, such as a robo 1 binding agent, a robo 2 binding agent and a rig-1 binding agent; a peptidomimetic; a fusion protein; a prodrug, an antibody; an agent that alters SLIT-3 gene or nucleic acid expression; an agent that alters a Robo family member nucleic acid expression; an agent that alters activity of a polypeptide encoded by a SLIT-3 gene; an agent that alters activity of a polypeptide encoded by a Robo family gene or nucleic acid; an agent that alters posttranscriptional processing of a polypeptide encoded by a SLIT-3 gene or nucleic acid; an agent that alters posttranscriptional processing of a polypeptide encoded by a member of the Robo family gene or nucleic acid; an agent that alters interaction of a SLIT-3 polypeptide with a SLIT-3 binding agent; an agent that alters interaction of a Robo family polypeptide with a Robo family binding agent, an agent that alters interaction of a SLIT-3 polypeptide with a Robo family member; an agent that alters transcription of splicing variants encoded by a SLIT-3 gene or nucleic acid; an agent that alters transcription of splicing variants encoded by a Robo family member gene or nucleic acid ;and ribozymes. The invention also relates to pharmaceutical compositions comprising at least one Type II diabetes therapeutic agent as described herein.

[0019] The invention also pertains to a method of treating a disease or condition associated with a SLIT-3 polypeptide (e.g., Type II diabetes) or with members of the Robo family (such as, robo 1, robo 2 and rig-1) in an individual, comprising administering a Type II diabetes therapeutic agent to the individual, in a therapeutically effective amount. In certain embodiments, the Type II diabetes therapeutic agent is a SLIT-3 agonist or an agonist of a member of the Robo family; in other embodiments, the Type II diabetes therapeutic agent is a SLIT-3 antagonist or an antagonist of a member of the Robo family. The invention additionally pertains to use of a Type II diabetes therapeutic agent as described herein, for the manufacture of a medicament for use in the treatment of Type II diabetes, such as by the methods described herein.

[0020] A transgenic animal comprising a nucleic acid selected from the group consisting of: an exogenous SLIT-3 gene or nucleic acid and a nucleic acid encoding a SLIT-3 polypeptide, is further contemplated by the invention.

[0021] In yet another embodiment, the invention relates to a method for assaying a sample for the presence of a SLIT-3 nucleic acid: comprising contacting the sample with a nucleic acid comprising a contiguous nucleotide sequence which is at least partially complementary to a part of the sequence of said SLIT-3 nucleic acid under conditions appropriate for hybridization, and assessing whether hybridization has occurred between a SLIT-3 nucleic acid and said nucleic acid comprising a contiguous nucleotide sequence which is at least partially complementary to a part of the sequence of said SLIT-3 nucleic acid; wherein if hybridization has occurred, a SLIT-3 nucleic acid is present in sample. In certain embodiments, the contiguous nucleotide sequence is completely complementary to a part of the sequence of said SLIT-3 nucleic acid. If desired, amplification of at least part of said SLIT-3 nucleic acid can be performed.

[0022] In certain other embodiments, the contiguous nucleotide sequence is 100 or fewer nucleotides in length and is either at least 80% identical to a contiguous sequence of nucleotides in one of the nucleic acid sequences as shown in FIG. 10, at least 80% identical to the complement of a contiguous sequence of nucleotides in one of the nucleic acid sequences as shown in FIG. 10, or capable of selectively hybridizing to said SLIT-3 nucleic acid.

[0023] In other embodiments, the invention relates to a reagent for assaying a sample for the presence of a SLIT-3 gene or nucleic acid, the reagent comprising a contiguous nucleotide sequence which is at least partially complementary to a part of the nucleic acid sequence of said SLIT-3 gene (nucleic acid) or the reagent is completely complementary to a part of the nucleic acid sequence of said SLIT-3 gene or nucleic acid. Also contemplated by the invention is a reagent kit, e.g., for assaying a sample for the presence of a SLIT-3 nucleic acid, comprising (e.g., in separate containers) one or more labeled nucleic acids comprising a contiguous nucleotide sequence which is at least partially complementary to a part of the nucleic acid sequence of the SLIT-3 nucleic acid, and reagents for detection of said label. In certain embodiments, the labeled nucleic acid comprises a contiguous nucleotide sequence that is completely complementary to a part of the nucleotide sequence of said SLIT-3 gene or nucleic acid. In other embodiments, the labeled nucleic acid can comprise a contiguous nucleotide sequence which is at least partially complementary to a part of the nucleotide sequence of said SLIT-3 gene or nucleic acid, and which is capable of acting as a primer for said SLIT-3 nucleic acid when maintained under conditions for primer extension.

[0024] The invention also provides for the use of a nucleic acid which is 100 or fewer nucleotides in length and which is either: a) at least 80% identical to a contiguous sequence of nucleotides in one of the nucleic acid sequences as shown in FIG. 10; b) at least 80% identical to the complement of a contiguous sequence of nucleotides in one of the nucleic acid sequences as shown in FIG. 10; or c) capable of selectively hybridizing to said SLIT-3 nucleic acid, for assaying a sample for the presence of a SLIT-3 nucleic acid.

[0025] In yet another embodiment, the use of a first nucleic acid which is 100 or fewer nucleotides in length and which is either: a) at least 80% identical to a contiguous sequence of nucleotides in one of the nucleic acid sequences as shown in FIG. 10; b) at least 80% identical to the complement of a contiguous sequence of nucleotides in one of the nucleic acid sequences as shown in FIG. 10; or c) capable of selectively hybridizing to said SLIT-3 nucleic acid; for assaying a sample for the presence of a SLIT-3 gene that has at least one nucleotide difference from the first nucleic acid (e.g., a SNP or marker as set forth in FIG. 11), such as for diagnosing a susceptibility to a disease or condition associated with a SLIT-3.

[0026] The invention also relates to a method of diagnosing a susceptibility to Type II diabetes in an individual, comprising determining the presence or absence in the individual of a certain haplotypes (combinations of genetic markers). In one aspect of the invention of diagnosising a susceptibility of the disease, methods are described comprising screening for one of the at-risk haplotypes in the SLIT3 gene that is more frequently present in an individual susceptible to Type II diabetes, compared to the frequency of its presence in the general population, wherein the presence of an at-risk haplotype is indicative of a susceptibility to Type II diabetes. An “at-risk haplotype” is intended to embrace one or a combination of haplotypes described herein over the SLIT3 gene that show high correlation to Type II diabetes. In one embodiment, the at-risk haplotype is characterized by the presence of at least one single nucleotide polymorphisms as described in FIG. 11. In one embodiment, a haplotype associated with Type II diabetes or a susceptibility to type II diabetes comprises one or more haplotypes identified in Table 2 (haplotypes identified as A1, A2, A3, A4, A5, A6, B1, B2, B3, B4 and B5) or Table 5 (haplotypes identified as C1, C2, C3, C4, and C5). In other embodiments, the at-risk haplotype comprises comprising one or more of the markers set forth in FIG. 11, at the 5q35 locus, wherein the presence of the haplotype is diagnostic of susceptibility to Type II diabetes. In another embodiment, the invention relates to a method of diagnosing a susceptibility to Type It diabetes in an individual, comprising determining the presence or absence in the individual of a haplotype comprising one or more of the following markers: one or more of the to markers in the haplotypes set forth in Table 2 and/or Table 5, and/or one or more of the makers set forth in Table 4, at the 5q35 locus. The presence or absence of the haplotype can be determined by various methods, including, for example, using enzymatic amplification of nucleic acid from the individual, electrophoretic analysis, restriction fragment length polymorphism analysis and/or sequence analysis.

[0027] The invention also relates to a method of diagnosing a susceptibility to Type II diabetes in an individual, comprising: obtaining a nucleic acid sample from said individual; and analyzing the nucleic acid sample for the presence or absence of a haplotype comprising one or more of the markers set forth in FIG. 11, at the 5q35 locus, wherein the presence of the haplotype is diagnostic for a susceptibility to Type II diabetes. In another embodiment, the invention relates to a method of diagnosing a susceptibility to Type II diabetes in an individual, comprising: obtaining a nucleic acid sample from said individual; and analyzing the nucleic acid sample for the presence or absence of a haplotype comprising one or more of the following markers: one or more markers set forth in the haplotypes set forth in Table 2 and/or Table 5, and/or one or more of the makers set forth in Table 4, at the 5q35 locus, wherein the presence of the haplotype is diagnostic for a susceptibility to Type II diabetes.

[0028] Also described herein is a method of diagnosing Type II diabetes or a susceptibility to Type II diabetes in an individual, comprising determining the presence or absence in the individual of a haplotype comprising one or more markers and/or single nucleotide polymorphisms as shown in FIG. 11 in the locus on chromosome 5q35, wherein the presence of the haplotype is diagnostic of Type II diabetes or a susceptibility to Type II diabetes.

[0029] A method for the diagnosis and identification or a susceptibility to Type II diabetes in an individual is also described, comprising: screening for an at-risk haplotype in the SLIT-3 nucleic acid that is more frequently present in an individual susceptible to Type It diabetes compared to an individual who is not susceptible to Type II diabetes wherein the at-risk haplotype increases the risk significantly. In certain embodiments, the significant increase is at least about 20% or the significant increase is identified as an odds ratio of at least about 1.2.

[0030] A major application of the current invention involves prediction of those at higher risk of developing a Type II diabetes. Diagnostic tests that define genetic factors contributing to Type II diabetes might be used together with or independent of the known clinical risk factors to define an individual's risk relative to the general population. Better means for identifying those individuals at risk for Type II diabetes should lead to better prophylactic and treatment regimens, including more aggressive management of the current clinical risk factors.

[0031] Another application of the current invention is the specific identification of a rate-limiting pathway involved in Type II diabetes. A disease gene with genetic variation that is significantly more common in diabetic patients as compared to controls represents a specifically validated causative step in the pathogenesis of Type II diabetes. That is, the uncertainty about whether a gene is causative or simply reactive to the disease process is eliminated. The protein encoded by the disease gene defines a rate-limiting molecular pathway involved in the biological process of Type II diabetes predisposition. The proteins encoded by such Type II genes or its interacting proteins in its molecular pathway may represent drug targets that may be selectively modulated by small molecule, protein, antibody, or nucleic acid therapies. Such specific information is greatly needed since the population affected with Type II diabetes is growing.

[0032] A third application of the current invention is its use to predict an individual's response to a particular drug, even drugs that do not act on SLIT3 or its pathway. It is a well-known phenomenon that in general, patients do not respond equally to the same drag. Much of the differences in drug response to a given drug is thought to be based on genetic and protein differences among individuals in certain genes and their corresponding pathways. Our invention defines the association of SLIT3 with Type II diabetes. Some current or future therapeutic agents may be able to affect this gene directly or indirectly and therefore, be effective in those patients whose Type II diabetes risk is in part determined by the SLIT3 genetic variation. On the other hand, those same drugs may be less effective or ineffective in those patients who do not have at risk variation in the SLIT3 gene. Therefore, SLIT3 variation or haplotypes may be used as a pharmacogenomic diagnostic to predict drug response and guide choice of therapeutic agent in a given individual.

### BRIEF DESCRIPTION OF THE DRAWINGS

[0033] The foregoing and other objects, features and advantages of the invention will be apparent from the following more particular description of preferred embodiments of the invention, as illustrated in the accompanying drawings.

[0034] FIGS. 1A-1O9 shows the SLIT-3 genomic DNA (SEQ ID NO: 1). This sequence is taken from NCBI Build33. The numbering in FIG. 1, as well as the “Start” and “End” numbers in all of the Figures, refer to the location in Chromosome is 5 in NCBI Build33. The numbering in FIG. 1 refers to the last base in the line immediately preceding the number; the numbers are in decreasing order because of the “reverse orientation” of the gene.

[0035] FIG. 2 is a series of graphs showing the results of a genome-wide scan using 906 microsatellite markers. Results are shown for three phenotypes: all type 2 diabetics (solid lines), obese diabetics (dotted lines) and non-obese diabetics (dashed lines). The multipoint allele-sharing LOD-score is on the vertical axis, and the centiMorgan distance from the P-terminus of the chromosome is on the horizontal axis.

[0036] FIG. 3 graphically shows the multipoint allele-sharing LOD-score of the locus on chromosome 5 after 38 microsatellite markers have been added to the framework set in a 40-cM interval, from 160 cM to 200 cM. Results are shown for the same three phenotypes as in FIG. 2; all II diabetics (solid line), non-obese (dashed line) and obese diabetics (dotted SNPs).

[0037] FIG. 4 graphically depicts single-marker and haplotype association within the 1-LOD-drop for 590 non-obese diabetics vs 477 unrelated population controls. The location of the markers/haplotypes is on the horizontal axis and the corresponding two-sided P-value on the vertical axis. All haplotypes with a P-value less than 0.01 are shown. The horizontal bars indicate the span of the corresponding haplotypes and the marker density is shown at the bottom of the figure. All locations refer to NCBI Build33 and the 1-LOD-drop spans from 167.64 to 171.28 Mb.

[0038] FIG. 5 schematically shows the locations of genes and markers in region A The microsatellites used in the locus-wide association study are shown as filled circles at the top. The filled boxes indicate the locations of exons, or clusters of exons, for SLIT3. Note that the orientation of the SLIT3 gene, 5′ to 3′, is from righ to left. The shaded boxes indicate the location and size of the neighboring genes, ODZ2, KIAA0869, RARS and PANK3, and the grey horizontal bars indicate the span of the six most significant microsatellite haplotypes in the region.

[0039] FIG. 6 graphically depicts the single-marker allelic association within SLIT3. a The exonic structure of SLIT3. b Location of all microsatellites (top) and SNPs (bottom) used in the association analysis. c Single-marker allelic association, with P-value<0.05, across SLIT3. The plot shows negative log P-values versus the physical location in megabases (NCBI33). The grey horizontal bar at the bottom indicates the span of the most significant microsatellite and SNP haplotoype C1. The same horizontal scale is used for a, b and c.

[0040] FIGS. 7A-Q shows the DNA sequence of microsatellites employed for the C05 locus wide association (including Build33 locations).

[0041] FIG. 8 shows the Build33 location of SLIT3 exons.

[0042] FIGS. 9A and B shows the Build33 location of SNPs found across SLIT3 after sequencing of the exons and flanking sequences.

[0043] FIGS. 10A-P2 shows the DNA sequence of the SNPs identified across SLIT3.

[0044] FIGS. 11A-C shows the Build33 location of all SNPs and microsatellites identified as polymorphic across SLIT3.

[0045] FIGS. 12A-F shows the DNA sequence of the microsatellites employed for the association studies across SLIT3 (including Build33 locations).

[0046] FIGS. 13A-C shows the names of the SNPs and microsatellites employed for the association analysis across SLIT3.

[0047] FIGS. 14A and B shows the amino acid sequence for the SLIT3 protein.

### DETAILED DESCRIPTION OF THE INVENTION

[0048] Extensive genealogical information for a population with population-based lists of patients with Type II diabetes has been combined with powerful gene sharing methods to map a locus on chromosome 5q35. Diabetics and their relatives were genotyped with a genome-wide marker set Due to the role obesity plays in the development of diabetes, the material was fractionated according to body mass index (BMI). Presented herein are results of a genome wide search of genes that cause Type II diabetes in Iceland.

Loci Associated with Diabetes

[0049] Evidence for genes causing the early onset monogenic form of diabetes have been previously identified. Mutations in six genes have been discovered that cause MODY, or maturity onset diabetes of the young. MODY1-MODY6 are due to mutations in HNF4a, glucokinase, HNF1a, IPF1, HNF1b and NEUROD1 (MODY1: Yamagata K, et al., Nature 384:458-460 (1996); MODY2: Froguel P, F et al. Nature 356: 162-164(1992); MODY3: Yamagata, K., et al., Nature 384: 455-458 (1996); MODY4: Yoshioka M., et al. Diabetes May;46(5):887-94 (1997) MODY5: Horikawa, Y., et al. Nat. Genet. 17: 384-3 85 (1997) MODY6: Kristinsson S. Y., et al., Diabetologia November;44(11):2098-103 (2001)).

[0050] One gene has been identified as a disease gene that contributes to the late-onset form of diabetes, the calpain 10 gene (CAPN10). CAPN10, was identified though a genome-wide screen of Mexican American sibpairs with diabetes (Horikawa, Y., et al., Nat. Genet. 26(2) 163-175(2000)). The risk allele has been shown to be associated with impaired regulation of glucose-induced secretion and decreased rate of insulin-stimulated glucose disposal (Lynn, S., et al., Diabetes, 51(1): 247-250 (2002); Sreenan, S. K., et al., Diabetes 50(9) 2013-2020 (2001) and Baier, L. J., et al., J. Clin. Invest. 106(7) R69-73 (2000)).

[0051] Many genome-wide screens in a variety of populations have been performed that have resulted in major loci for Diabetes. Loci are reported on chromosome 2q37 (Hanis, C. L., et al., Nat. Genet., 13(2):161-166 (1996)), chromosome 15q21 (Cox, et al., Nat. Genet. 21(2):213-215 (1999)), chromosome 10q26 (Duggirala, R., et al., Am. J. Hum. Genet., 68(5):1149-1164 (2001)), chromosome 3p (Ehm, M. G., et al., Am. J. Hum. Genet., 66(6):1871-1881 (2000)) in Mexican Americans, and chromosomes 1q21-23 and 11q23-q25 (Hanson R. L. et al., Am J. Hum Genet., 63(4):1130-1138 (1998)) in PIMA Indians. In the Caucasian population, linkages have been observed to chromosome 12q24 in Finns (Mahtani, et al., Nat. Genet., 14(1):90-4 (1994)), chromosome 1q21-q23 in Americans in Utah (Elbein, S. C., et al., Diabetes, 48(5):1175-1182 (1999)), chromosome 3q27-pter in French families (Vionnet, N., et al., Am. J. Hum. Genet. 67(6): 1470-80 (2000) and chromosome 18p11 in Scandinavians (Parker, A., et al., Diabetes, 50(3) 675-680 (2001)). A recent study reported a major locus in indigenous Australians on chromosome 2q24.3 (Busfield, F, et al., Am. J. Hum. Genet., 70(2): 349-357 (2002)). Many other studies have resulted in suggestive loci or have replicated these loci.

[0052] Association studies have been reported for Type II diabetes. Most of these studies show modest association to the disease in a group of people but do not account for the disease. Altshuler et al. reviewed the association work that has been done and concluded that association to only one of 16 genes revealed held up to scrutiny. Altshuler et al. confirmed that the Pro12A1a polymorphism in PPARg is associated with Type II diabetes. Until now, there have been no linkage studies in Type II diabetes linking the disease to chromosome 5q35.

[0053] SLIT-3

[0054] The invention described herein has linked Type II diabetes to a gene known as SLIT-3 (slit homolog 3 (Drosophila)). Drosophila SLIT is a secreted protein involved in midline patterning. In the Drosophila nervous system, SLIT is produced by midline glial cells and functions as a chemorepellant to prevent the recrossing of commissural axons (Kidd, T., et al., Cell, 96:785-794 (1999)). This is mediated by the Roundabout, or Robo, family of receptors, which contain five Ig domains, three fibronectin type III (FNIII) repeats, a single transmembrane domain, and an intracellular domain with a number of conserved cytoplasmic motifs (Kidd, T., et al., Cell, 92:205-215 (1998)). There are three vertebrate SLIT genes and three distinct Robo genes (robo1, robo2, rig-1) (Yuan, S. S., et al., Dev. Biol., 207:62-75 (1999); Brose, K., et al., Cell, 96:795-806 (1999)). At the vertebrate midline, it has been proposed that expression of SLITs and Robos controls the crossing axons in the spinal cord (Zou, Y., et al., Cell, 102:363-375 (2000)), retinal ganglion cell axons at the optic chiasm (Fricke, C., et al., Science, 292:507-510 (2001); Erskine, L., et al., J. Neurosci., 20:4975-4982 (2000); and Niclou, S. P., et al., J. Neurosci., 20:4962-4974 (2000)), and fibers of the corpus callosum (Shu, T., and L. J. Richards, J. Neurosci., 21:2749-2758 (2001)).

[0055] In addition to the Robo family of receptors, SLIT proteins have been demonstrated to be ligands for CDO in myogenic differentiation (Kang, J. S., et al., J. Cell Biol., 143:403-413 (1998)), DCC (a netrin receptor) in midline crossing (Stein, E and M. Tessier-Lavigne, Science, 291:1928-1938 (2001)) and glypican (expressed in motor neurons).

[0056] In situ hybridization studies in the developing mouse embryo have shown that SLIT-3 is expressed in the developing brain, eyes, ears, nose and limb buds (Yuan, S. S., et al., Dev. Biol., 207:62-75 (1999)). In addition, in situ hybridizations of rat brains (embryonic and adult) demonstrate that SLIT proteins have a role in both the developing and adult brain (Marillat, V., et al., J. Comp. Neurol., 442: 130-155 (2002)).

[0057] Itoh et al. cloned human SLIT-3 in 1998 (Itoh, A., et al., Brain Res. Mol. Brain Res., 62:175-186 (1998)). The mRNA size for SLIT-3 is 5.5 kb and 9.5 kb with the smaller transcript being predominant. The open reading frame (ORF) is 4569 bp and encodes a 1523 amino acid polypeptide. Northern blot analysis revealed expression in fetal lung and fetal kidney. In human adult tissues, SLIT-1 and SLIT-3 mRNAs are mainly expressed in the brain, spinal cord, and thyroid, respectively. SLIT-2 is also expressed weakly in the adrenal gland, thyroid, and trachea. SLIT-3 is expressed in the ovary, heart and small intestine (Itoh, A., et al., ibid.). Based on expression patterns of these proteins, it has been suggested that SLIT proteins have a role in the endocrine system as well as in the nervous system. SLIT-3 has been proposed to contribute to the morphogenesis of the endocrine system (Itoh, A., et al., ibid.). Expression in pancreas, liver, skeletal muscle, adipose tissue, small intestine and hypothalamus has been observed with PCR on tissue-specific cDNA (data not shown). PCR analysis of radiation hybrid panels mapped the SLIT-3 gene to chromosome 5q35 (Nakayama, M, et al., Genomics, 51:27-34 (1998)).

[0058] The predicted amino acid sequences of human SLIT-2 and SLIT-3 display the same domain structures and an approximately 60% similarity to SLIT-1. SLIT-1, SLIT-2 and SLIT-3 all comprise a putative signal peptide, four units of tandem arrays of leucine-rich repeats (LRR) bordering amino- and carboxy-terminal conserved flanking regions (LRR-NR, LRR-CR), two groups of EGF-like motif repeats, an Agrin-Laminin Perlecan-SLIT (ALPS) conserved domain, and a cysteine-rich (Cys-rich) carboxy-terminal domain. However, they have no putative transmembrane domains as predicted by hydrophobicity plots. As such, the SLIT proteins contain many binding domains and may interact with one or more proteins. Compared with the drosophila SLIT protein, the three human SLIT proteins share a number of EGF-like motifs and the repeat number of LRR1 and LRR3. The region containing four units of LRR is the most conserved element among the human SLIT proteins, and the number of amino acids that make up this region is completely conserved among the three proteins (Itoh, A., et al., ibid.).

[0059] It has been proposed that SLIT-3 has potentially unique functions not shared by other SLIT proteins (Little, M. H., et al., Am. J. Physiol. Cell. Physiol., 281: C485-495 (2001)). The cellular distribution and processing of mammalian SLIT-3 gene product has been characterized in kidney epithelial cells. SLIT-3, but not SLIT-2, is predominantly localized within the mitochondria. In confluent epithelial monolayers, SLIT-3 is also transported to the cell surface. However, there is no evidence of SLIT-3 proteolytic processing similar to that seen for SLIT-2. SLIT-3 contains an NH₂-terminal mitochondrial localization signal that can direct a reporter green fluorescent protein to the mitochondria. The equivalent region from SLIT-1 cannot elicit mitochondrial targeting. As such, it has been concluded the SLIT-3 protein is targeted and localized to two distinct sites within epithelial cells: the mitochondria, and, in more confluent cells, the cell surface. Targeting to both locations is driven by specific NH₂-terminal sequences.

[0060] Studies have shown a link between disruptions in mitochondrial functioning and Type II diabetes. Indeed, mitochondrial dysfunction in the β-cell is well described (Maechler, P., and C. B. Wollheim, Nature, 414:807-812 (2001)). Genetic disturbances in mitochondrial DNA (mtDNA) can lead to the development of a number of genetic disorders that present with a Type II diabetes phenotype. A mutation in the mitochondrial tRNA (Leu)(UUR) gene was described in a large pedigree with maternally transmitted Type II diabetes and deafness (van den Ouweland, J. M., et al., Nat. Genet., 1:368-371 (1992)). Decreases in mtDNA copy number have also been linked to the pathogenesis of diabetes. Although the contribution of variations in mtDNA to the development of Type II diabetes in unknown, a 50% decrease in mtDNA copy number in skeletal muscle of Type II diabetes has been observed (Antonetti, D. A., et al., J. Clin. Invest., 95:1383-1388 (1 995)). Reduced mtDNA content has also been reported in peripheral blood cells in such patients even before the onset of the disease (Lee, H. K., et al., Diabetes Res. Clin. Pract., 42:161-167 (1998)).

[0061] Described herein is the first known linkage study of Type II diabetes showing a connection to chromosome 5q35. Based on the linkage studies conducted, a direct relationship between Type II diabetes and the locus on chromosome 5q35, in particular the SLIT-3 gene, has been discovered.

### NUCLEIC ACIDS OF THE INVENTION

SLIT-3 Nucleic Acids, Portions and Variants

[0062] Accordingly, the invention pertains to isolated nucleic acid molecules comprising human SLIT-3 nucleic acid. The term, “SLIT-3 nucleic acid,” as used herein, refers to an isolated nucleic acid molecule encoding a SLIT-3 polypeptide (e.g., a SLIT-3 gene). The SLIT-3 nucleic acid molecules of the present invention can be RNA, for example, mRNA, or DNA, such as cDNA and genomic DNA. DNA molecules can be double-stranded or single-stranded; single stranded RNA or DNA can be either the coding, or sense, strand or the non-coding, or antisense strand. The nucleic acid molecule can include all or a portion of the coding sequence of the gene and can further comprise additional non-coding sequences such as introns and non-coding 3′ and 5′ sequences (including regulatory sequences, for example).

[0063] For example, the SLIT-3 nucleic acid can be the genomic sequence shown in FIG. 1, or a portion or fragment of the isolated nucleic acid molecule (e.g. cDNA or the gene) that encodes SLIT-3 polypeptide. In certain embodiments, the isolated nucleic acid molecule comprises a nucleic acid molecule selected from the group consisting of the sequences shown in FIG. 10, or the complement of such a nucleic acid molecule.

[0064] Additionally, nucleic acid molecules of the invention can be fused to a marker sequence, for example, a sequence that encodes a polypeptide to assist in isolation or purification of the polypeptide. Such sequences include, but are not limited to, those that encode a glutathione-S-transferase (GST) fusion protein and those that encode a hemagglutinin A (HA) polypeptide marker from influenza.

[0065] An “isolated” nucleic acid molecule, as used herein, is one that is separated from nucleic acids that normally flank the gene or nucleotide sequence (as in genomic sequences) and/or has been completely or partially purified from other transcribed sequences (e.g., as in an RNA library). For example, an isolated nucleic acid of the invention may be substantially isolated with respect to the complex cellular milieu in which it naturally occurs, or culture medium when produced by recombinant techniques, or chemical precursors or other chemicals when chemically synthesized. In some instances, the isolated material will form part of a composition (for example, a crude extract containing other substances), buffer system or reagent mix. In other circumstances, the material may be purified to essential homogeneity, for example as determined by PAGE or column chromatography such as HPLC. Preferably, an isolated nucleic acid molecule comprises at least about 50, 80 or 90% (on a molar basis) of all macromolecular species present. With regard to genomic DNA, the term “isolated” also can refer to nucleic acid molecules that are separated from the chromosome with which the genomic DNA is naturally associated. For example, the isolated nucleic acid molecule can contain less than about 5 kb but not limited to 4 kb, 3 kb, 2 kb, 1 kb, 0.5 kb or 0.1 kb of nucleotides which flank the nucleic acid molecule in the genomic DNA of the cell from which the nucleic acid molecule is derived.

[0066] The nucleic acid molecule can be fused to other coding or regulatory sequences and still be considered isolated. Thus, recombinant DNA contained in a vector is included in the definition of “isolated” as used herein. Also, isolated nucleic acid molecules include recombinant DNA molecules in heterologous host cells, as well as partially or substantially purified DNA molecules in solution. “Isolated” nucleic acid molecules also encompass in vivo and in vitro RNA transcripts of the DNA molecules of the present invention. An isolated nucleic acid molecule can include a nucleic acid molecule or nucleic acid sequence that is synthesized chemically or by recombinant means. Therefore, recombinant DNA contained in a vector is included in the definition of “isolated” as used herein. Also, isolated nucleic acid molecules include recombinant DNA molecules in heterologous organisms, as well as partially or substantially purified DNA molecules in solution. In vivo and in vitro RNA transcripts of the DNA molecules of the present invention are also encompassed by “isolated” nucleic acid sequences. Such isolated nucleic acid molecules are useful in the manufacture of the encoded polypeptide, as probes for isolating homologous sequences (e.g., from other mammalian species), for gene mapping (e.g., by in situ hybridization with chromosomes), or for detecting expression of the gene in tissue (e.g., human tissue), such as by Northern blot analysis.

[0067] The present invention also pertains to nucleic acid molecules which are not necessarily found in nature but which encode a SLIT-3 polypeptide, or another splicing variant of a SLIT polypeptide or polymorphic variant thereof. Thus, for example, the invention pertains to DNA molecules comprising a sequence that is different from the naturally occurring nucleotide sequence but which, due to the degeneracy of the genetic code, encode a SLIT polypeptide of the present invention. The invention also encompasses nucleic acid molecules encoding portions (fragments), or encoding variant polypeptides such as analogues or derivatives of a SLIT-3 polypeptide. Such variants can be naturally occurring, such as in the case of allelic variation or single nucleotide polymorphisms, or non-naturally-occurring, such as those induced by various mutagens and mutagenic processes. Intended variations include, but are not limited to, addition, deletion and substitution of one or more nucleotides that can result in conservative or non-conservative amino acid changes, including additions and deletions. Preferably the nucleotide (and/or resultant amino acid) changes are silent or conserved; that is, they do not alter the characteristics or activity of a SLIT-3 polypeptide. In one embodiment, the nucleic acid sequences are fragments that comprise one or more polymorphic microsatellite markers. In another embodiment, the nucleotide sequences are fragments that comprise one or more single nucleotide polymorphisms in a SLIT-3 gene.

[0068] Other alterations of the nucleic acid molecules of the invention can include, for example, labeling, methylation, internucleotide modifications such as uncharged linkages (e.g., methyl phosphonates, phosphotriesters, phosphoanidates, carbamates), charged linkages (e.g., phosphorothioates, phosphorodithioates), pendent moieties (e.g., polypeptides), intercalators (e.g., acridine, psoralen), chelators, alkylators, and modified linkages (e.g., alpha anomeric nucleic acids). Also included are synthetic molecules that mimic nucleic acid molecules in the ability to bind to a designated sequence via hydrogen bonding and other chemical interactions. Such molecules include, for example, those in which peptide linkages substitute for phosphate linkages in the backbone of the molecule.

[0069] The invention also pertains to nucleic acid molecules that hybridize under high stringency hybridization conditions, such as for selective hybridization, to a nucleotide sequence described herein (e.g. nucleic acid molecules which specifically hybridize to a nucleotide sequence encoding polypeptides described herein, and, optionally, have an activity of the polypeptide). In one embodiment, the invention includes variants described herein which hybridize under high stringency hybridization conditions (e.g., for selective hybridization) to a nucleotide sequence comprising a nucleotide sequence selected from the group consisting of the sequences shown in FIG. 10. In another embodiment, the invention includes variants described herein that hybridize under high stringency hybridization conditions (e.g. for selective hybridization) to a nucleotide sequence encoding an amino acid sequence or a polymorphic variant thereof. In a preferred embodiment, the variant that hybridizes under high stringency hybridizations has an activity of a SLIT polypeptide.

[0070] Such nucleic acid molecules can be detected and/or isolated by specific hybridization (e.g., under high stringency conditions). “Specific hybridization,” as used herein, refers to the ability of a first nucleic acid to hybridize to a second nucleic acid in a manner such that the first nucleic acid does not hybridize to any nucleic acid other than to the second nucleic acid (e.g., when the first nucleic acid has a higher similarity to the second nucleic acid than to any other nucleic acid in a sample wherein the hybridization is to be performed). “Stringency conditions” for hybridization is a term of art which refers to the incubation and wash conditions, e.g., conditions of temperature and buffer concentration, which permit hybridization of a particular nucleic acid to a second nucleic acid; the first nucleic acid may be perfectly (i.e., 100%) complementary to the second, or the first and second may share some degree of complementarity which is less than perfect (e.g., 70%, 75%, 85%, 95%). For example, certain high stringency conditions can be used which distinguish perfectly complementary nucleic acids from those of less complementarity. “High stringency conditions”, “moderate stringency conditions” and “low stringency conditions” for nucleic acid hybridizations are explained on pages 2.10.1-2.10.16 and pages 6.3.1-6.3.6 in Current Protocols in Molecular Biology (Ausubel, F. M. et al., “Current Protocols in Molecular Biology”, John Wiley & Sons, (2001)), the entire teachings of which are incorporated by reference herein). The exact conditions which determine the stringency of hybridization depend not only on ionic strength (e.g., 0.2×SSC, 0.1×SSC), temperature (e.g., room temperature, 42° C., 68° C.) and the concentration of destabilizing agents such as formamide or denaturing agents such as SDS, but also on factors such as the length of the nucleic acid sequence, base composition, percent mismatch between hybridizing sequences and the frequency of occurrence of subsets of that sequence within other non-identical sequences. Thus, equivalent conditions can be determined by varying one or more of these parameters while maintaining a similar degree of identity or similarity between the two nucleic acid molecules. Typically, conditions are used such that sequences at least about 60%, at least about 70%, at least about 80%, at least about 90% or at least about 95% or more identical to each other remain hybridized to one another. By varying hybridization conditions from a level of stringency at which no hybridization occurs to a level at which hybridization is first observed, conditions which will allow a given sequence to hybridize (e.g., selectively) with the most similar sequences in the sample can be determined.

[0071] Exemplary conditions are described in Krause, M. H. and S. A. Aaronson, Methods in Enzymology 200:546-556 (1991), and in, Ausubel, et al., “Current Protocols in Molecular Biology”, John Wiley & Sons, (2001), which describes the determination of washing conditions for moderate or low stringency conditions. Washing is the step in which conditions are usually set so as to determine a minimum level of complementarity of the hybrids. Generally, starting from the lowest temperature at which only homologous hybridization occurs, each ° C. by which the final wash temperature is reduced (holding SSC concentration constant) allows an increase by 1% in the maximum extent of mismatching among the sequences that hybridize. Generally, doubling the concentration of SSC results in an increase in Tₘ of −17° C. Using these guidelines, the washing temperature can be determined empirically for high, moderate or low stringency, depending on the level of mismatch sought.

[0072] For example, a low stringency wash can comprise washing in a solution containing 0.2×SSC/0.1% SDS for 10 minutes at room temperature; a moderate stringency wash can comprise washing in a pre-warmed solution (42° C.) solution containing 0.2×SSC/0.1% SDS for 15 minutes at 42° C.; and a high stringency wash can comprise washing in pre-warmed (68° C.) solution containing 0.1×SSC/0.1% SDS for 15 minutes at 68° C. Furthermore, washes can be performed repeatedly or sequentially to obtain a desired result as known in the art. Equivalent conditions can be determined by varying one or more of the parameters given as an example, as known in the art, while maintaining a similar degree of identity or similarity between the target nucleic acid molecule and the primer or probe used.

[0073] The percent homology or identity of two nucleotide or amino acid sequences can be determined by aligning the sequences for optimal comparison purposes (e.g., gaps can be introduced in the sequence of a first sequence for optimal alignment). The nucleotides or amino acids at corresponding positions are then compared, and the percent identity between the two sequences is a function of the number of identical positions shared by the sequences (i.e., % identity=# of identical positions/total # of positions×100). When a position in one sequence is occupied by the same nucleotide or amino acid residue as the corresponding position in the other sequence, then the molecules are homologous at that position. As used herein, nucleic acid or amino acid “homology” is equivalent to nucleic acid or amino acid “identity”. In certain embodiments, the length of a sequence aligned for comparison purposes is at least 30%, for example, at least 40%, in certain embodiments at least 60%, and in other embodiments at least 70%, 80%, 90% or 95% of the length of the reference sequence. The actual comparison of the two sequences can be accomplished by well-known methods, for example, using a mathematical algorithm. A preferred, non-lirniting example of such a mathematical algorithm is described in Karlin et al., Proc. Natl. Acad. Sc. USA 90:5873-5877 (1993). Such an algorithm is incorporated into the NBLAST and XBLAST programs (version 2.0) as described in Altschul et al., Nucleic Acids Res. 25:389-3402 (1997). When utilizing BLAST and Gapped BLAST programs, the default parameters of the respective programs (e.g., NBLAST) can be used. In one embodiment, parameters for sequence comparison can be set at score=100, wordlength=12, or can be varied (e.g., W=5 or W=20).

[0074] Another preferred, non-limiting example of a mathematical algorithm utilized for the comparison of sequences is the algorithm of Myers and Miller, CABIOS 4(1): 11-17 (1988). Such an algorithm is incorporated into the ALIGN program (version 2.0) which is part of the GCG sequence alignment software package (Accelrys, Cambridge, UK). When utilizing the ALIGN program for comparing amino acid sequences, a PAM120 weight residue table, a gap length penalty of 12, and a gap penalty of 4 can be used. Additional algorithms for sequence analysis are known in the art and include ADVANCE and ADAM as described in Torellis and Robotti, Comput. Appl. Biosci. 10:3-5 (1994); and FASTA described in Pearson and Lipman, Proc. Natl. Acad. Sci. USA 85:2444-8 (1988).

[0075] In another embodiment, the percent identity between two amino acid sequences can be accomplished using the GAP program in the GCG software package using either a BLOSUM63 matrix or a PAM250 matrix, and a gap weight of 12, 10, 8, 6, or 4 and a length weight of 2, 3, or 4. In yet another embodiment, the percent identity between two nucleic acid sequences can be accomplished using the GAP program in the GCG software package using a gap weight of 50 and a length weight of 3.

[0076] The present invention also provides isolated nucleic acid molecules that contain a fragment or portion that hybridizes under highly stringent conditions to a nucleotide sequence comprising a nucleotide sequence selected from the group consisting of the sequences shown in FIG. 10, or the complement of such a sequence, and also provides isolated nucleic acid molecules that contain a fragment or portion that hybridizes under highly stringent conditions to a nucleotide sequence encoding an amino acid sequence or polymorphic variant thereof. The nucleic acid fragments of the invention are at least about 15, preferably at least about 18, 20, 23 or 25 nucleotides, and can be 30, 40, 50, 100, 200 or more nucleotides in length. Longer fragments, for example, 30 or more nucleotides in length, that encode antigenic polypeptides described herein are particularly useful, such as for the generation of antibodies as described below.

Probes and Primers

[0077] In a related aspect, the nucleic acid fragments of the invention are used as probes or primers in assays such as those described herein. “Probes” or “primers” are oligonucleotides that hybridize in a base-specific manner to a complementary strand of nucleic acid molecules. Such probes and primers include polypeptide nucleic acids, as described in Nielsen et al., Science 254:1497-1500 (1991).

[0078] A probe or primer comprises a region of nucleotide sequence that hybridizes to at least about 15, for example about 20-25, and in certain embodiments about 40, 50 or 75, consecutive nucleotides of a nucleic acid molecule comprising a contiguous nucleotide sequence selected from the group consisting of the sequences shown in FIG. 10, or polymorphic variant thereof. In other embodiments, a probe or primer comprises 100 or fewer nucleotides, in certain embodiments from 6 to 50 nucleotides, for example from 12 to 30 nucleotides. In other embodiments, the probe or primer is at least 70% identical to the contiguous nucleotide sequence or to the complement of the contiguous nucleotide sequence, for example at least 80% identical, in certain embodiments at least 90% identical, and in other embodiments at least 95% identical, or even capable of selectively hybridizing to the contiguous nucleotide sequence or to the complement of the contiguous nucleotide sequence. Often, the probe or primer further comprises a label, e.g., radioisotope, fluorescent compound, enzyme, or enzyme co-factor.

[0079] The nucleic acid molecules of the invention such as those described above can be identified and isolated using standard molecular biology techniques and the sequence information provided herein. For example, nucleic acid molecules can be amplified and isolated by the polymerase chain reaction using synthetic oligonucleotide primers designed based on one or more of the sequences selected from the group consisting of the sequences shown in FIG. 10, or the complement of such a sequence, or designed based on nucleotides based on sequences encoding one or more of the amino acid sequences provided herein. See generally PCR Technology: Principles and Applications for DNA Amplification (ed. H. A. Erlich, Freeman Press, NY, N.Y., 1992); PCR Protocols: A Guide to Methods and Applications (Eds. Innis et al., Academic Press, San Diego, Calif., 1990); Mattila et al., Nucl. Acids Res. 19: 4967 (1991); Eckert et al., PCR Methods and Applications 1:17 (1991); PCR (eds. McPherson et al., IRL Press, Oxford); and U.S. Pat. No. 4,683,202. The nucleic acid molecules can be amplified using cDNA, mRNA or genomic DNA as a template, cloned into an appropriate vector and characterized by DNA sequence analysis.

[0080] Other suitable amplification methods include the ligase chain reaction (LCR) (see Wu and Wallace, Genomics 4:560 (1989), Landegren et al., Science 241:1077 (1988), transcription amplification (Kwoh et al., Proc. Natl. Acad. Sci. USA 86:1173 (1989)), and self-sustained sequence replication (Guatelli et al., Proc. Nat. Acad. Sci. USA 87:1874 (1990)) and nucleic acid based sequence amplification (NASBA). The latter two amplification methods involve isothermal reactions based on isothermal transcription, which produce both single stranded RNA (ssRNA) and double stranded DNA (dsDNA) as the amplification products in a ratio of about 30 or 100 to 1, respectively.

[0081] The amplified DNA can be labeled, for example, radiolabeled, and used as a probe for screening a cDNA library derived from human cells, mRNA in zap express, ZIPLOX or other suitable vector. Corresponding clones can be isolated, DNA can obtained following in vivo excision, and the cloned insert can be sequenced in either or both orientations by art recognized methods to identify the correct reading frame encoding a polypeptide of the appropriate molecular weight. For example, the direct analysis of the nucleotide sequence of nucleic acid molecules of the present invention can be accomplished using well-known methods that are commercially available. See, for example, Sambrook et al., Molecular Cloning, A Laboratory Manual (2nd Ed., CSHP, New York 1989); Zyslind et al., Recombinant DNA Laboratory Manual, (Acad. Press, 1988)). Additionally, fluorescence methods are also available for analyzing nucleic acids (Chen et al., Genome Res. 9, 492 (1999)) and polypeptides. Using these or similar methods, the polypeptide and the DNA encoding the polypeptide can be isolated, sequenced and further characterized.

[0082] Antisense nucleic acid molecules of the invention can be designed using the nucleotide sequences of one or more of the sequences shown in FIG. 10, and/or the complement of one or more of the sequences shown in FIG. 10, and/or a portion of one or more of the sequences shown in FIG. 10, or the complement of one or more of the sequences shown in FIG. 10, and constructed using chemical synthesis and enzymatic ligation reactions using procedures known in the art. For example, an antisense nucleic acid molecule (e.g., an antisense oligonucleotide) can be chemically synthesized using naturally occurring nucleotides or variously modified nucleotides designed to increase the biological stability of the molecules or to increase the physical stability of the duplex formed between the antisense and sense nucleic acids, e.g., phosphorothioate derivatives and acridine substituted nucleotides can be used. Alternatively, the antisense nucleic acid molecule can be produced biologically using an expression vector into which a nucleic acid molecule has been subcloned in an antisense orientation (i.e., RNA transcribed from the inserted nucleic acid molecule will be of an antisense orientation to a target nucleic acid of interest).

[0083] The nucleic acid sequences can also be used to compare with endogenous DNA sequences in patients to identify one or more of the disorders described above, and as probes, such as to hybridize and discover related DNA sequences or to subtract out known sequences from a sample. The nucleic acid sequences can further be used to derive primers for genetic fingerprinting, to raise anti-polypeptide antibodies using DNA immunization techniques, and as an antigen to raise anti-DNA antibodies or elicit immune responses. Portions or fragments of the nucleotide sequences identified herein (and the corresponding complete gene sequences) can be used in numerous ways as polynucleotide reagents. For example, these sequences can be used to: (i) map their respective genes on a chromosome; and, thus, locate gene regions associated with genetic disease; (ii) identify an individual from a minute biological sample (tissue typing); and (iii) aid in forensic identification of a biological sample. Additionally, the nucleotide sequences of the invention can be used to identify and express recombinant polypeptides for analysis, characterization or therapeutic use, or as markers for tissues in which the corresponding polypeptide is expressed, either constitutively, during tissue differentiation, or in diseased states. The nucleic acid sequences can additionally be used as reagents in the screening and/or diagnostic assays described herein, and can also be included as components of kits (e.g., reagent kits) for use in the screening and/or diagnostic assays described herein.

Vectors and Host Cells

[0084] Another aspect of the invention pertains to nucleic acid constructs containing a nucleic acid molecule selected from the group consisting of the sequences shown in FIG. 10, and the complements thereof (or a portion thereof). The constructs comprise a vector (e.g., an expression vector) into which a sequence of the invention has been inserted in a sense or antisense orientation As used herein, the term “vector” refers to a nucleic acid molecule capable of transporting another nucleic acid to which it has been linked. One type of vector is a “plasmid”, which refers to a circular double stranded DNA loop into which additional DNA segments can be ligated. Another type of vector is a viral vector, wherein additional DNA segments can be ligated into the viral genome. Certain vectors are capable of autonomous replication in a host cell into which they are introduced (e.g., bacterial vectors having a bacterial origin of replication and episomal mammalian vectors). Other vectors (e.g., non-episomal mammalian vectors) are integrated into the genome of a host cell upon introduction into the host cell, and thereby are replicated along with the host genome. Expression vectors are capable of directing the expression of genes to which they are operably linked. In general, expression vectors of utility in recombinant DNA techniques are often in the form of plasmids. However, the invention is intended to include such other forms of expression vectors, such as viral vectors (e.g., replication defective retroviruses, adenoviruses and adeno-associated viruses) that serve equivalent functions.

[0085] In certain embodiments, recombinant expression vectors of the invention comprise a nucleic acid molecule of the invention in a form suitable for expression of the nucleic acid molecule in a host cell. This means that the recombinant expression vectors include one or more regulatory sequences, selected on the basis of the host cells to be used for expression, which is operably linked to the nucleic acid sequence to be expressed. Within a recombinant expression vector, “operably linked” or “operatively linked” is intended to mean that the nucleotide sequence of interest is linked to the regulatory sequence(s) in a manner which allows for expression of he nucleotide sequence (e.g., in an in vitro transcription/translation system or in a host cell when the vector is introduced into the host cell). The term “regulatory sequence” is intended to include promoters, enhancers and other expression control elements (e.g., polyadenylation signals). Such regulatory sequences are described, for example, in Goeddel, “Gene Expression Technology”, Methods in Enzymology 185, Academic Press, San Diego, Calif. (1990). Regulatory sequences include those which direct constitutive expression of a nucleotide sequence in many types of host cell and those which direct expression of the nucleotide sequence only in certain host cells (e.g., tissue-specific regulatory sequences). It will be appreciated by those skilled in the art that the design of the expression vector can depend on such factors as the choice of the host cell to be transformed and the level of expression of polypeptide desired. The expression vectors of the invention can be introduced into host cells to thereby produce polypeptides, including fusion polypeptides, encoded by nucleic acid molecules as described herein.

[0086] The recombinant expression vectors of the invention can be designed for expression of a polypeptide of the invention in prokaryotic or eukaryotic cells, e.g., bacterial cells such as E. coli, insect cells (using baculovirus expression vectors), yeast cells or mammalian cells. Suitable host cells are discussed further in Goeddel, supra. Alternatively, the recombinant expression vector can be transcribed and translated in vitro, for example using T7 promoter regulatory sequences and T7 polymerase.

[0087] Another aspect of the invention pertains to host cells into which a recombinant expression vector of the invention has been introduced. The terms “host cell” and “recombinant host cell” are used interchangeably herein. It is understood that such terms refer not only to the particular subject cell but also to the progeny or potential progeny of such a cell. Because certain modifications may occur in succeeding generations due to either mutation or environmental influences, such progeny may not, in fact, be identical to the parent cell, but are still included within the scope of the term as used herein.

[0088] A host cell can be any prokaryotic or eukaryotic cell. For example, a nucleic acid molecule of the invention can be expressed in bacterial cells (e.g., E. coli), insect cells, yeast or mammalian cells (such as Chinese hamster ovary cells (CHO) or COS cells). Other suitable host cells are known to those skilled in the art.

[0089] Vector DNA can be introduced into prokaryotic or eukaryotic cells via conventional transformation or transfection techniques. As used herein, the terms “transformation” and “transfection” are intended to refer to a variety of art-recognized techniques for introducing a foreign nucleic acid molecule (e.g. DNA) into a host cell, including calcium phosphate or calcium chloride co-precipitation, DEAE-dextran-mediated transfection, lipofection, or electroporation. Suitable methods for transforming or transfecting host cells can be found in Sambrook, et al. (supra), and other laboratory manuals.

[0090] For stable transfection of mammalian cells, it is known that, depending upon the expression vector and transfection technique used, only a small fraction of cells may integrate the foreign DNA into their genome. In order to identify and select these integrants, a gene that encodes a selectable marker (e.g. for resistance to antibiotics) is generally introduced into the host cells along with the gene of interest. Preferred selectable markers include those that confer resistance to drugs, such as G418, hygromycin and methotrexate. Nucleic acid molecules encoding a selectable marker can be introduced into a host cell on the same vector as the nucleic acid molecule of the invention or can be introduced on a separate vector. Cells stably transfected with the introduced nucleic acid molecule can be identified by drug selection (e.g., cells that have incorporated the selectable marker gene will survive, while the other cells die).

[0091] A host cell of the invention, such as a prokaryotic or eukaryotic host cell in culture, can be used to produce (i.e., express) a polypeptide of the invention. Accordingly, the invention further provides methods for producing a polypeptide using the host cells of the invention. In one embodiment, the method comprises culturing the host cell of invention (into which a recombinant expression vector encoding a polypeptide of the invention has been introduced) in a suitable medium such that the polypeptide is produced. In another embodiment, the method further comprises isolating the polypeptide from the medium or the host cell.

[0092] The host cells of the invention can also be used to produce nonhuman transgenic animals. For example, in one embodiment, a host cell of the invention is a fertilized oocyte or an embryonic stem cell into which a nucleic acid molecule of the invention has been introduced (e.g., an exogenous SLIT gene, or an exogenous nucleic acid encoding a SLIT polypeptide). Such host cells can then be used to create non-human transgenic animals in which exogenous nucleotide sequences have been introduced into the genome or homologous recombinant animals in which endogenous nucleotide sequences have been altered. Such animals are useful for studying the function and/or activity of the nucleotide sequence and polypeptide encoded by the sequence and for identifying and/or evaluating modulators of their activity. As used herein, a “transgenic animal” is a non-human animal, preferably a mammal, more preferably a rodent such as a rat or mouse, in which one or more of the cells of the animal include a transgene. Other examples of transgenic animals include non-human primates, sheep, dogs, cows, goats, chickens and amphibians. A transgene is exogenous DNA which is integrated into the genome of a cell from which a transgenic animal develops and which remains in the genome of the mature animal, thereby directing the expression of an encoded gene product in one or more cell types or tissues of the transgenic animal. As used herein, an “homologous recombinant animal” is a non-human animal, preferably a mammal, more preferably a mouse, in which an endogenous gene has been altered by homologous recombination between the endogenous gene and an exogenous DNA molecule introduced into a cell of the animal, e.g., an embryonic cell of the animal prior to development of the animal.

[0093] Methods for generating transgenic animals via embryo manipulation and microinjection, particularly animals such as mice, have become conventional in the art and are described, for example, in U.S. Pat. Nos. 4,736,866 and 4,870,009, U.S. Pat. No. 4,873,191 and in Hogan, Manipulating the Mouse Embryo (Cold Spring Harbor Laboratory Press, Cold Spring Harbor, N.Y., 1986). Methods for constructing homologous recombination vectors and homologous recombinant animals are described further in Bradley, Current Opinion in BioTechnology 2:823-829 (1991) and in PCT Publication Nos. WO 90/11354, WO 91/01140, WO 92/0968, and WO 93/04169. Clones of the non-human transgenic animals described herein can also be produced according to the methods described in Wilmut et al., Nature 385:810-813 (1997) and PCT Publication Nos. WO 97/07668 and WO 97/07669.

### POLYPEPTIDES OF THE INVENTION

[0094] The present invention also pertains to isolated polypeptides encoded by SLIT-3 nucleic acids (“SLIT-3 polypeptides”) and fragments and variants thereof, as well as polypeptides encoded by nucleotide sequences described herein (e.g., other splicing variants). The term “polypeptide” refers to a polymer of amino acids, and not to a specific length; thus, peptides, oligopeptides and proteins are included within the definition of a polypeptide. As used herein, a polypeptide is said to be “isolated” or “purified” when it is substantially free of cellular material when it is isolated from recombinant and non-recombinant cells, or free of chemical precursors or other chemicals when it is chemically synthesized. A polypeptide, however, can be joined to another polypeptide with which it is not normally associated in a cell (e.g., in a “fusion protein”) and still be “isolated” or “purified.”

[0095] The polypeptides of the invention can be purified to homogeneity. It is understood, however, that preparations in which the polypeptide is not purified to homogeneity are useful. The critical feature is that the preparation allows for the desired function of the polypeptide, even in the presence of considerable amounts of other components. Thus, the invention encompasses various degrees of purity. In one embodiment, the language “substantially free of cellular material” includes preparations of the polypeptide having less than about 30% (by dry weight) other proteins (i.e., contaminating protein), less than about 20% other proteins, less than about 10% other proteins, or less than about 5% other proteins.

[0096] When a polypeptide is recombinantly produced, it can also be substantially free of culture medium, i.e., culture medium represents less than about 20%, less than about 10%, or less than about 5% of the volume of the polypeptide preparation. The language “substantially free of chemical precursors or other chemicals” includes preparations of the polypeptide in which it is separated from chemical precursors or other chemicals that are involved in its synthesis. In one embodiment, the language “substantially free of chemical precursors or other chemicals” includes preparations of the polypeptide having less than about 30% (by dry weight) chemical precursors or other chemicals, less than about 20% chemical precursors or other chemicals, less than about 10% chemical precursors or other chemicals, or less than about 5% chemical precursors or other chemicals.

[0097] In one embodiment, a polypeptide of the invention comprises an amino acid sequence encoded by a nucleic acid molecule comprising a nucleotide sequence selected from the group consisting of the sequences shown in FIG. 10, or the complement of such a nucleic acid, or portions thereof, e.g., the sequences shown in FIG. 10, or a portion or polymorphic variant thereof. However, the polypeptides of the invention also encompass fragment and sequence variants. Variants include a substantially homologous polypeptide encoded by the same genetic locus in an organism, i.e., an allelic variant, as well as other splicing variants. Variants also encompass polypeptides derived from other genetic loci in an organism, but having substantial homology to a polypeptide encoded by a nucleic acid molecule comprising a nucleotide sequence selected from the group consisting of the sequences shown in FIG. 10, or a complement of such a sequence, or portions thereof or polymorphic variants thereof. Variants also include polypeptides substantially homologous or identical to these polypeptides but derived from another organism, i.e., an ortholog. Variants also include polypeptides that are substantially homologous or identical to these polypeptides that are produced by chemical synthesis. Variants also include polypeptides that are substantially homologous or identical to these polypeptides that are produced by recombinant methods.

[0098] As used herein, two polypeptides (or a region of the polypeptides) are substantially homologous or identical when the amino acid sequences are at least about 45-55%, in certain embodiments at least about 70-75%, and in other embodiments, at least about 80-85%, an in other embodiments greater than about 90% or more homologous or identical. A substantially homologous amino acid sequence, according to the present invention, will be encoded by a nucleic acid molecule hybridizing to one or more of the sequences shown in FIG. 10, or portion thereof, under stringent conditions as more particularly described above, or will be encoded by a nucleic acid molecule hybridizing to a nucleic acid sequence encoding one of the sequences shown in FIG. 10, a portion thereof or polymorphic variant thereof, under stringent conditions as more particularly described thereof.

[0099] The invention also encompasses polypeptides having a lower degree of identity but having sufficient similarity so as to perform one or more of the same functions performed by a polypeptide encoded by a nucleic acid molecule of the invention.

[0100] Similarity is determined by conserved amino acid substitution where a given amino acid in a polypeptide is substituted by another amino acid of like characteristics. Conservative substitutions are likely to be phenotypically silent. Typically seen as conservative substitutions are the replacements, one for another, among the aliphatic amino acids Ala, Val, Leu and Ile; interchange of the hydroxyl residues Ser and Thr, exchange of the acidic residues Asp and Glu, substitution between the amide residues Asn and Gln, exchange of the basic residues Lys and Arg and replacements among the aromatic residues Phe and Tyr. Guidance concerning which amino acid changes are likely to be phenotypically silent are found in Bowie et al., Science 247:1306-1310 (1990).

[0101] A variant polypeptide can differ in amino acid sequence by one or more substitutions, deletions, insertions, inversions, fusions, and truncations or a combination of any of these. Further, variant polypeptides can be fully functional or can lack function in one or more activities. Fully functional variants typically contain only conservative variation or variation in non-critical residues or in noncritical regions. Functional variants can also contain substitution of similar amino acids that result in no change or an insignificant change in function. Alternatively, such substitutions may positively or negatively affect function to some degree. Non-functional variants typically contain one or more non-conservative amino acid substitutions, deletions, insertions, inversions, or truncation or a substitution, insertion, inversion, or deletion in a critical residue or critical region.

[0102] Amino acids that are essential for function can be identified by methods known in the art, such as site-directed mutagenesis or alanine-scanning mutagenesis (Cunningham et al., Science 244:1082-1185 (1989)). The latter procedure introduces single alanine mutations at every residue in the molecule. The resulting mutant molecules are then tested for biological activity in vitro, or in vitro proliferative activity. Sites that are critical for polypeptide activity can also be determined by structural analysis such as crystallization, nuclear magnetic resonance or photoaffinity labeling (Smith et al., J. Mol. Biol. 224:899-904 (1992); de Vos et al., Science 255:306-312 (1992)).

[0103] The invention also includes polypeptide fragments of the polypeptides of the invention. Fragments can be derived from a polypeptide encoded by a nucleic acid molecule comprising one of the sequences shown in FIG. 10, or a complement of such a nucleic acid or other variants. However, the invention also encompasses fragments of the variants of the polypeptides described herein. As used herein, a fragment comprises at least 6 contiguous amino acids. Useful fragments include those that retain one or more of the biological activities of the polypeptide as well as fragments that can be used as an immunogen to generate polypeptide-specific antibodies.

[0104] Biologically active fragments (peptides which are, for example, 6, 9, 12, 15, 16, 20, 30, 35, 36, 37, 38, 39, 40, 50, 100 or more amino acids in length) can comprise a domain, segment, or motif that has been identified by analysis of the polypeptide sequence using well-known methods, e.g., signal peptides, extracellular domains, one or more transmembrane segments or loops, ligand binding regions, zinc finger domains, DNA binding domains, acylation sites, glycosylation sites, or phosphorylation sites.

[0105] Fragments can be discrete (not fused to other amino acids or polypeptides) or can be within a larger polypeptide. Further, several fragments can be comprised within a single larger polypeptide. In one embodiment a fragment designed for expression in a host can have heterologous pre- and pro-polypeptide regions fused to the amino terminus of the polypeptide fragment and an additional region fused to the carboxyl terminus of the fragment.

[0106] The invention thus provides chimeric or fusion polypeptides. These comprise a polypeptide of the invention operatively linked to a heterologous protein or polypeptide having an amino acid sequence not substantially homologous to the polypeptide.

[0107] “Operatively linked” indicates that the polypeptide and the heterologous protein are fused in-frame. The heterologous protein can be fused to the N-terminus or C-terminus of the polypeptide. In one embodiment the fusion polypeptide does not affect function of the polypeptide per se. For example, the fusion polypeptide can be a GST-fusion polypeptide in which the polypeptide sequences are fused to the C-terminus of the GST sequences. Other types of fusion polypeptides include, but are not limited to, enzymatic fusion polypeptides, for example beta-galactosidase fusions, yeast two-hybrid GAL fusions, poly-His fusions and Tg fusions. Such fusion polypeptides, particularly poly-His fusions, can facilitate the purification of recombinant polypeptide. In certain host cells (e.g., mammalian host cells), expression and/or secretion of a polypeptide can be increased using a heterologous signal sequence. Therefore, in another embodiment, the fusion polypeptide contains a heterologous signal sequence at its N-terminus.

[0108] EP-A-O 464 533 discloses fusion proteins comprising various portions of immunoglobulin constant regions. The Fc is useful in therapy and diagnosis and thus results, for example, in improved pharmacokinetic properties (EP-A 0232 262). In drug discovery, for example, human proteins have been fused with Fc portions for the purpose of high-throughput screening assays to identify antagonists. Bennett et al., Journal of Molecular Recognition, 8:52-58 (1995) and Johanson et al., The Journal of Biological Chemistry, 270,16:9459-9471 (1995). Thus, this invention also encompasses soluble fusion polypeptides containing a polypeptide of the invention and various portions of the constant regions of heavy or light chains of immunoglobulins of various subclasses (IgG, IgM, IgA, IgE).

[0109] A chimeric or fusion polypeptide can be produced by standard recombinant DNA techniques. For example, DNA fragments coding for the different polypeptide sequences are ligated together in-frame in accordance with conventional techniques. In another embodiment, the fusion gene can be synthesized by conventional techniques including automated DNA synthesizers. Alternatively, PCR amplification of nucleic acid fragments can be carried out using anchor primers which give rise to complementary overhangs between two consecutive nucleic acid fragments which can subsequently be annealed and re-amplified to generate a chimeric nucleic acid sequence (see Ausubel et al., Current Protocols in Molecular Biology, 1992).

[0110] Moreover, many expression vectors are commercially available that already encode a fusion moiety (e.g., a GST protein). A nucleic acid molecule encoding a polypeptide of the invention can be cloned into such an expression vector such that the fusion moiety is linked in-frame to the polypeptide.

[0111] The isolated polypeptide can be purified from cells that naturally express it, can be purified from cells that have been altered to express it (recombinant), or synthesized using known protein synthesis methods. In one embodiment, the polypeptide is produced by recombinant DNA techniques. For example, a nucleic acid molecule encoding the polypeptide is cloned into an expression vector, the expression vector introduced into a host cell and the polypeptide expressed in the host cell. The polypeptide can then be isolated from the cells by an appropriate purification scheme using standard protein purification techniques.

[0112] The polypeptides of the present invention can be used to raise antibodies or to elicit an immune response. The polypeptides can also be used as a reagent, e.g., a labeled reagent, in assays to quantitatively determine levels of the polypeptide or a molecule to which it binds (e.g., a ligand) in biological fluids. The polypeptides can also be used as markers for cells or tissues in which the corresponding polypeptide is preferentially expressed, either constitutively, during tissue differentiation, or in a diseased state. The polypeptides can be used to isolate a corresponding binding agent, e.g., ligand, such as, for example, in an interaction trap assay, and to screen for peptide or small molecule antagonists or agonists of the binding interaction.

### ANTIBODIES OF THE INVENTION

[0113] Polyclonal antibodies and/or monoclonal antibodies that specifically bind one form of the gene or nucleic acid product but not to the other form of the gene or nucleic acid product are also provided. Antibodies are also provided which bind a portion of either the variant or the reference gene product that contains the polymorphic site or sites. The term “antibody” as used herein refers to immunoglobulin molecules and immunologically active portions of immunoglobulin molecules, i.e., molecules that contain an antigen binding site that specifically bind an antigen. A molecule that specifically binds to a polypeptide of the invention is a molecule that binds to that polypeptide or a fragment thereof, but does not substantially bind other molecules in a sample, e.g., a biological sample, which naturally contains the polypeptide. Examples of immunologically active portions of immunoglobulin molecules include F(ab) and F(ab′)₂ fragments which can be generated by treating the antibody with an enzyme such as pepsin. The invention provides polyclonal and monoclonal antibodies that bind to a polypeptide of the invention. The term “monoclonal antibody” or “monoclonal antibody composition”, as used herein, refers to a population of antibody molecules that contain only one species of an antigen binding site capable of immunoreacting with a particular epitope of a polypeptide of the invention. A monoclonal antibody composition thus typically displays a single binding affinity for a particular polypeptide of the invention with which it immunoreacts.

[0114] Polyclonal antibodies can be prepared as described above by immunizing a suitable subject with a desired immunogen, e.g., polypeptide of the invention or a fragment thereof. The antibody titer in the immunized subject can be monitored over time by standard techniques, such as with an enzyme linked immunosorbent assay (ELISA) using immobilized polypeptide. If desired, the antibody molecules directed against the polypeptide can be isolated from the mammal (e.g., from the blood) and further purified by well-known techniques, such as protein A chromatography to obtain the IgG fraction. At an appropriate time after immunization, e.g., when the antibody titers are highest, antibody-producing cells can be obtained from the subject and used to prepare monoclonal antibodies by standard techniques, such as the hybridoma technique originally described by Kohler and Milstein, Nature 256:495-497 (1975), the human B cell hybridoma technique (Kozbor et al., Immunol. Today 4: 72 (1983)), the EBV-hybridoma technique (Cole et al., Monoclonal Antibodies and Cancer Therapy, Alan R. Liss, 1985, Inc., pp. 77-96) or trioma techniques. The technology for producing hybridomas is well known (see generally Current Protocols in Immunology (1994) Coligan et al. (eds.) John Wiley & Sons, Inc., New York, N.Y.). Briefly, an immortal cell line (typically a myeloma) is fused to lymphocytes (typically splenocytes) from a mammal immunized with an immunogen as described above, and the culture supernatants of the resulting hybridoma cells are screened to identify a hybridoma producing a monoclonal antibody that binds a polypeptide of the invention.

[0115] Any of the many well known protocols used for fusing lymphocytes and immortalized cell lines can be applied for the purpose of generating a monoclonal antibody to a polypeptide of the invention (see, e.g., Current Protocols in Immunology, supra; Galfre et al., Nature 266:55052 (1977); R. H. Kenneth, in Monoclonal Antibodies: A New Dimension In Biological Analyses, Plenum Publishing Corp., New York, N.Y. (1980); and Lerner, Yale J. Biol. Med. 54:387-402 (1981)). Moreover, the ordinarily skilled worker will appreciate that there are many variations of such methods that also would be useful.

[0116] Alternative to preparing monoclonal antibody-secreting hybridomas, a monoclonal antibody to a polypeptide of the invention can be identified and isolated by screening a recombinant combinatorial immunoglobulin library (e.g., an antibody phage display library) with the polypeptide to thereby isolate immunoglobulin library members that bind the polypeptide. Kits for generating and screening phage display libraries are commercially available (e.g., the Pharmacia Recombinant Phage Antibody System, Catalog No. 27-9400-01; and the Stratagene SurfZAP™ Phage Display Kit, Catalog No. 240612). Additionally, examples of methods and reagents particularly amenable for use in generating and screening antibody display library can be found in, for example, U.S. Pat. No. 5,223,409; PCT Publication No. WO 92/18619; PCT Publication No. WO 91/17271; PCT Publication No. WO 92/20791; PCT Publication No. WO 92/15679; PCT Publication No. WO 93/01288; PCT Publication No. WO 92/01047; PCT Publication No. WO 92/09690; PCT Publication No. WO 90/02809; Fuchs et al., Bio/Technology 9: 1370-1372 (1991); Hay et al., Hum. Antibod. Hybridomas 3:81-85 (1992); Huse et al., Science 246: 1275-1281 (1989); and Griffiths et al., EMBO J. 12:725-734 (1993).

[0117] Additionally, recombinant antibodies, such as chimeric and humanized monoclonal antibodies, comprising both human and non-human portions, which can be made using standard recombinant DNA techniques, are within the scope of the invention. Such chimeric and humanized monoclonal antibodies can be produced by recombinant DNA techniques known in the art.

[0118] In general, antibodies of the invention (e.g., a monoclonal antibody) can be used to isolate a polypeptide of the invention by standard techniques, such as affinity chromatography or immunoprecipitation. A polypeptide-specific antibody can facilitate the purification of natural polypeptide from cells and of recombinantly produced polypeptide expressed in host cells. Moreover, an antibody specific for a polypeptide of the invention can be used to detect the polypeptide (e.g., in a cellular lysate, cell supernatant, or tissue sample) in order to evaluate the abundance and pattern of expression of the polypeptide. Antibodies can be used diagnostically to monitor protein levels in tissue as part of a clinical testing procedure, e.g., to, for example, determine the efficacy of a given treatment regimen. The antibody can be coupled to a detectable substance to facilitate its detection. Examples of detectable substances include various enzymes, prosthetic groups, fluorescent materials, luminescent materials, bioluminescent materials, and radioactive materials. Examples of suitable enzymes include horseradish peroxidase, alkaline phosphatase, -galactosidase, or acetylcholinesterase; examples of suitable prosthetic group complexes include streptavidin/biotin and avidin/biotin; examples of suitable fluorescent materials include umbelliferone, fluorescein, fluorescein isothiocyanate, rhodamine, dichlorotriazinylamine fluorescein, dansyl chloride or phycoerythrin; an example of a luminescent material includes luminol; examples of bioluminescent materials include luciferase, luciferin, and aequorin, and examples of suitable radioactive material include ¹²⁵I, ¹³¹I, ³⁵S or ³H.

Diagnostic Assays

[0119] The nucleic acids, probes, primers, polypeptides and antibodies described herein can be used in methods of diagnosis of Type II diabetes or of a susceptibility to Type II diabetes, or of a condition associated with a SLIT-3 gene, as well as in kits (e.g., useful for diagnosis of Type II diabetes, of a susceptibility to Type II diabetes, or of a condition associated with a SLIT-3 gene). In one embodiment, the kit comprises primers that contain one or more of the SNP's identified in FIG. 11.

[0120] In one embodiment of the invention, diagnosis of a disease or condition associated with a SLIT-3 gene (e.g., diagnosis of Type II diabetes, or of a susceptibility to Type II diabetes) is made by detecting a polymorphism in a SLIT nucleic acid as described herein. The polymorphism can be a change in a SLIT-3 nucleic acid, such as the insertion or deletion of a single nucleotide, or of more than one nucleotide, resulting in a frame shift; the change of at least one nucleotide, resulting in a change in the encoded amino acid; the change of at least one nucleotide, resulting in the generation of a premature stop codon; the deletion of several nucleotides, resulting in a deletion of one or more amino acids encoded by the nucleotides; the insertion of one or several nucleotides, such as by unequal recombination or gene conversion, resulting in an interruption of the coding sequence of the gene; duplication of all or a part of the gene; transposition of all or a part of the gene; or rearrangement of all or a part of the gene. More than one such change may be present in a single gene. Such sequence changes cause a difference in the polypeptide encoded by a SLUT-3 nucleic acid. For example, if the difference is a frame shift change, the frame shift can result in a change in the encoded amino acids, and/or can result in the generation of a premature stop codon, causing generation of a truncated polypeptide. Alternatively, a polymorphism associated with a disease or condition or a susceptibility to a disease or condition associated with a SLIT-3 nucleic acid can be a synonymous alteration in one or more nucleotides (i.e., an alteration that does not result in a change in the polypeptide encoded by a SLIT-3 nucleic acid). Such a polymorphism may alter splicing sites, affect the stability or transport of mRNA, or otherwise affect the transcription or translation of the gene. A SLIT-3 nucleic acid that has any of the changes or alterations described above is referred to herein as an “altered nucleic acid.”

[0121] In a first method of diagnosing Type II diabetes or a susceptibility to Type II diabetes, or another disease or condition associated with a SLIT-3 gene, hybridization methods, such as Southern analysis, Northern analysis, or in situ hybridizations, can be used (see Current Protocols in Molecular Biology, Ausubel, F. et al., eds, John Wiley & Sons, including all supplements through 1999). For example, a biological sample (a “test sample”) from a test subject (the “test individual”) of genomic DNA, RNA, or cDNA, is obtained from an individual, such as an individual suspected of having, being susceptible to or predisposed for, or carrying a defect for, the disease or condition, or the susceptibility to the disease or condition, associated with a SLIT-3 gene (e.g., Type II diabetes). The individual can be an adult, child, or fetus. The test sample can be from any source which contains genomic DNA, such as a blood sample, sample of amniotic fluid, sample of cerebrospinal fluid, or tissue sample from skin, muscle, buccal or conjunctival mucosa, placenta, gastrointestinal tract or other organs. A test sample of DNA from fetal cells or tissue can be obtained by appropriate methods, such as by amniocentesis or chorionic villus sampling. The DNA, RNA, or cDNA sample is then examined to determine whether a polymorphism in a SLIT-3 nucleic acid is present, and/or to determine which splicing variant(s) encoded by the SLIT-3 is present. The presence of the polymorphism or splicing variant(s) can be indicated by hybridization of the gene in the genomic DNA, RNA, or cDNA to a nucleic acid probe. A “nucleic acid probe”, as used herein, can be a DNA probe or an RNA probe; the nucleic acid probe can contain, for example, at least one polymorphism in a SLIT-3 nucleic acid (e.g., as set forth in FIG. 11) and/or contain a nucleic acid encoding a particular splicing variant of a SLIT-3 nucleic acid. The probe can be any of the nucleic acid molecules described above (e.g., the gene or nucleic acid, a fragment, a vector comprising the gene or nucleic acid, a probe or primer, etc.).

[0122] To diagnose Type II diabetes, or a susceptibility to Type II diabetes, or another condition associated with a SLIT-3 gene, a hybridization sample is formed by contacting the test sample containing a SLIT-3 nucleic acid with at least one nucleic acid probe. A preferred probe for detecting mRNA or genomic DNA is a labeled nucleic acid probe capable of hybridizing to mRNA or genomic DNA sequences described herein. The nucleic acid probe can be, for example, a full-length nucleic acid molecule, or a portion thereof, such as an oligonucleotide of at least 15, 30, 50, 100, 250 or 500 nucleotides in length and sufficient to specifically hybridize under stringent conditions to appropriate mRNA or genomic DNA. For example, the nucleic acid probe can be all or a portion of one of the sequences shown in FIG. 10, or the complement thereof, or a portion thereof. Other suitable probes for use in the diagnostic assays of the invention are described above (see e.g., probes and primers discussed under the heading, “Nucleic Acids of the Invention”).

[0123] The hybridization sample is maintained under conditions that are sufficient to allow specific hybridization of the nucleic acid probe to a SLIT-3 nucleic acid “Specific hybridization”, as used herein, indicates exact hybridization (e.g., with no mismatches). Specific hybridization can be performed under high stringency conditions or moderate stringency conditions, for example, as described above. In a particularly preferred embodiment, the hybridization conditions for specific hybridization are high stringency.

[0124] Specific hybridization, if present, is then detected using standard methods. If specific hybridization occurs between the nucleic acid probe and SLIT-3 nucleic acid in the test sample, then the SLIT-3 has the polymorphism, or is the splicing variant, that is present in the nucleic acid probe. More than one nucleic acid probe can also be used concurrently in this method. Specific hybridization of any one of the nucleic acid probes is indicative of a polymorphism in the SLIT-3 nucleic acid, or of the presence of a particular splicing variant encoding the SLIT-3 nucleic acid and is therefore diagnostic for a susceptibility to a disease or condition associated with a SLIT-3 nucleic acid (e.g., Type II diabetes).

[0125] In Northern analysis (see Current Protocols in Molecular Biology, Ausubel, F. et al., eds., John Wiley & Sons, supra) the hybridization methods described above are used to identify the presence of a polymorphism or a particular splicing variant, associated with a susceptibility to a disease or condition associated with a SLIT-3 gene (e.g., Type II diabetes). For Northern analysis, a test sample of RNA is obtained from the individual by appropriate means. Specific hybridization of a nucleic acid probe, as described above, to RNA from the individual is indicative of a polymorphism in a SLIT-3 nucleic acid, or of the presence of a particular splicing variant encoded by a SLIT-3 nucleic acid and is therefore diagnostic for Type II diabetes or a susceptibility to Type II diabetes or a condition associated with a SLIT-3 nucleic acid (e.g., Type II diabetes).

[0126] For representative examples of use of nucleic acid probes, see, for example, U.S. Pat. Nos. 5,288,611 and 4,851,330.

[0127] Alternatively, a peptide nucleic acid (PNA) probe can be used instead of a nucleic acid probe in the hybridization methods described above. PNA is a DNA mimic having a peptide-like, inorganic backbone, such as N-(2-aminoethyl)glycine units, with an organic base (A, G, C, T or U) attached to the glycine nitrogen via a methylene carbonyl linker (see, for example, Nielsen, P. E. et al., Bioconjugate Chemistry 5, American Chemical Society, p. 1 (1994). The PNA probe can be designed to specifically hybridize to a gene having a polymorphism associated with a susceptibility to a disease or condition associated with a SLIT-3 nucleic acid (e.g., Type II diabetes). Hybridization of the PNA probe to a SLIT-3 gene is diagnostic for Type II diabetes or a susceptibility to Type II diabetes or a condition associated with a SLIT-3 nucleic acid.

[0128] In another method of the invention, alteration analysis by restriction digestion can be used to detect an altered gene, or genes containing a polymorphism(s), if the alteration (mutation) or polymorphism in the gene results in the creation or elimination of a restriction site. A test sample containing genomic DNA is obtained from the individual. Polymerase chain reaction (PCR) can be used to amplify a SLIT-3 nucleic acid (and, if necessary, the flanking sequences) in the test sample of genomic DNA from the test individual. RFLP analysis is conducted as described (see Current Protocols in Molecular Biology, supra). The digestion pattern of the relevant DNA fragment indicates the presence or absence of the alteration or polymorphism in the SLIT-3 nucleic acid, and therefore indicates the presence or absence of Type II diabetes or the susceptibility to a disease or condition associated with a SLIT-3 nucleic acid.

[0129] Sequence analysis can also be used to detect specific polymorphisms in a SLIT-3 nucleic acid. A test sample of DNA or RNA is obtained from the test individual. PCR or other appropriate methods can be used to amplify the gene or nucleic acid, and/or its flanking sequences, if desired. The sequence of a SLIT-3 nucleic acid, or a fragment of the nucleic acid, or cDNA, or fragment of the cDNA, or mRNA, or fragment of the mRNA, is determined, using standard methods. The sequence of the nucleic acid, nucleic acid fragment, cDNA, cDNA fragment, mRNA, or mRNA fragment is compared with the known nucleic acid sequence of the gene, cDNA (e.g., one or more of the sequences shown in FIG. 10, or a complement thereof or mRNA, as appropriate. The presence of a polymorphism in the SLIT-3 indicates that the individual has Type II diabetes or a susceptibility to Type II diabetes.

[0130] Allele-specific oligonucleotides can also be used to detect the presence of a polymorphism in a SLIT-3 nucleic acid, through the use of dot-blot hybridization of amplified oligonucleotides with allele-specific oligonucleotide (ASO) probes (see, for example, Saiki, R. et al., Nature 324:163-166 (1986)). An “allele-specific oligonucleotide” (also referred to herein as an “allele-specific oligonucleotide probe”) is an oligonucleotide of approximately 10-50 base pairs, preferably approximately 15-30 base pairs, that specifically hybridizes to a SLIT-3 nucleic acid, and that contains a polymorphism associated with a susceptibility to a disease or condition associated with a SLIT-3 nucleic acid. An allele-specific oligonucleotide probe that is specific for particular polymorphisms in a SLIT-3 nucleic acid can be prepared, using standard methods (see Current Protocols in Molecular Biology, supra). To identify polymorphisms in the gene that are associated with a disease or condition associated with a SLIT-3 nucleic acid or a susceptibility to a disease or condition associated with a SLIT-3 nucleic acid a test sample of DNA is obtained from the individual. PCR can be used to amplify all or a fragment of a SLIT-3 nucleic acid and its flanking sequences. The DNA containing the amplified SLIT-3 nucleic acid (or fragment of the gene or nucleic acid) is dot-blotted, using standard methods (see Current Protocols in Molecular Biology, supra), and the blot is contacted with the oligonucleotide probe. The presence of specific hybridization of the probe to the amplified SLIT-3 nucleic acid is then detected. Hybridization of an allele-specific oligonucleotide probe to DNA from the individual is indicative of a polymorphism in the SLIT-3 nucleic acid, and is therefore indicative of a disease or condition to associated with a SLIT-3 nucleic acid or susceptibility to a disease or condition associated with a SLIT-3 nucleic acid (e.g., Type II diabetes).

[0131] The invention further provides allele-specific oligonucleotides that hybridize to the reference or variant allele of a gene or nucleic acid comprising a single nucleotide polymorphism or to the complement thereof. These oligonucleotides can be probes or primers.

[0132] An allele-specific primer hybridizes to a site on target DNA overlapping a polymorphism and only primes amplification of an allelic form to which the primer exhibits perfect complementarity. See Gibbs, Nucleic Acid Res. 17, 2427-2448 (1989). This primer is used in conjunction with a second primer, which hybridizes at a distal site. Amplification proceeds from the two primers, resulting in a detectable product, which indicates the particular allelic form is present. A control is usually performed with a second pair of primers, one of which shows a single base mismatch at the polymorphic site and the other of which exhibits perfect complementarity to a distal site. The single-base mismatch prevents amplification and no detectable product is formed. The method works best when the mismatch is included in the 3′-most position of the oligonucleotide aligned with the polymorphism because this position is most destabilizing to elongation from the primer (see, e.g., WO 93/22456).

[0133] With the addition of such analogs as locked nucleic acids (LNAs), the size of primers and probes can be reduced to as few as 8 bases. LNAs are a novel class of bicyclic DNA analogs in which the 2′ and 4′ positions in the furanose ring are joined via an O-methylene (oxy-LNA), S-methylene (thio-LNA), or amino methylene (amino-LNA) moiety. Common to all of these LNA variants is an affinity toward complementary nucleic acids, which is by far the highest reported for a DNA analog. For example, particular all oxy-LNA nonamers have been shown to have melting temperatures of 64° C. and 74° C. when in complex with complementary DNA or RNA, respectively, as oposed to 28° C. for both DNA and RNA for the corresponding DNA nonamer. Substantial increases in Tₘ are also obtained when LNA monomers are used in combination with standard DNA or RNA monomers. For primers and probes, depending on where the LNA monomers are included (e.g., the 3′ end, the 5′end, or in the middle), the Tₘ could be increased considerably.

[0134] In another embodiment, arrays of oligonucleotide probes that are complementary to target nucleic acid sequence segments from an individual, can be used to identify polymorphisms in a SLIT-3 nucleic acid. For example, in one embodiment, an oligonucleotide array can be used. Oligonucleotide arrays typically comprise a plurality of different oligonucleotide probes that are coupled to a surface of a substrate in different known locations. These oligonucleotide arrays, also described as “Genechips™,” have been generally described in the art, for example, U.S. Pat. No. 5,143,854 and PCT patent publication Nos. WO 90/15070 and 92/10092. These arrays can generally be produced using mechanical synthesis methods or light directed synthesis methods that incorporate a combination of photolithographic methods and solid phase oligonucleotide synthesis methods. See Fodor et al., Science 251:767-777 (1991), Pirrung et al., U.S. Pat. No. 5,143,854 (see also PCT Application No. WO 90/15070) and Fodor et al., PCT Publication No. WO 92/10092 and U.S. Pat. No. 5,424,186, the entire teachings of each of which are incorporated by reference herein. Techniques for the synthesis of these arrays using mechanical synthesis methods are described in, e.g., U.S. Pat. No. 5,384,261; the entire teachings of which are incorporated by reference herein. In another example, linear arrays can be utilized.

[0135] Once an oligonucleotide array is prepared, a nucleic acid of interest is hybridized with the array and scanned for polymorphisms. Hybridization and scanning are generally carried out by methods described herein and also in, e.g., published PCT Application Nos. WO 92/10092 and WO 95111995, and U.S. Pat. No. 5,424,186, the entire teachings of which are incorporated by reference herein. In brief, a target nucleic acid sequence that includes one or more previously identified polymorphic markers is amplified by well-known amplification techniques, e.g. PCR. Typically, this involves the use of primer sequences that are complementary to the two strands of the target sequence both upstream and downstream from the polymorphism. Asymmetric PCR techniques may also be used. Amplified target, generally incorporating a label, is then hybridized with the array under appropriate conditions. Upon completion of hybridization and washing of the array, the array is scanned to determine the position on the array to which the target sequence hybridizes. The hybridization data obtained from the scan is typically in the form of fluorescence intensities as a function of location on the array.

[0136] Although primarily described in terms of a single detection block, e.g., for detection of a single polymorphism, arrays can include multiple detection blocks, and thus be capable of analyzing multiple, specific polymorphisms. In alternative arrangements, it will generally be understood that detection blocks may be grouped within a single array or in multiple, separate arrays so that varying, optimal conditions may be used during the hybridization of the target to the array. For example, it may often be desirable to provide for the detection of those polymorphisms that fall within G-C rich stretches of a genomic sequence, separately from those falling in A-T rich segments. This allows for the separate optimization of hybridization conditions for each situation.

[0137] Additional uses of oligonucleotide arrays for polymorphism detection can be found, for example, in U.S. Pat. Nos. 5,858,659 and 5,837,832, the entire teachings of which are incorporated by reference herein. Other methods of nucleic acid analysis can be used to detect polymorphisms in a Type II diabetes gene or variants encoding by a Type II diabetes gene. Representative methods include direct manual sequencing (Church and Gilbert, Proc. Natl. Acad. Sci. USA 81:1991-1995 (1988); Sanger, F. et al., Proc. Natl. Acad. Sci. USA 74:5463-5467 (1977); Beavis et al. U.S. Pat. No. 5,288,644); automated fluorescent sequencing; single-stranded conformation polymorphism assays (SSCP); clamped denaturing gel electrophoresis (CDGE); denaturing gradient gel electrophoresis (DGGE) (Sheffield, V. C. et al., Proc. Natl. Acad. Sci. USA 86:232-236 (1989)), mobility shift analysis (Orita, M. et al., Proc. Natl. Acad Sci. USA 86:2766-2770 (1989)), restriction enzyme analysis (Flavell et al., Cell 15:25 (1978); Geever, et al., Proc. Natl. Acad. Sci. USA 78:5081 (1981)); heteroduplex analysis; chemical mismatch cleavage (CMC) (Cotton et al., Proc. Natl. Acad. Sci. USA 85:4397-4401 (1985)); RNase protection assays (Myers, R. M. et al., Science 230:1242 (1985)); use of polypeptides which recognize nucleotide mismatches, such as E. coli mutS protein; allele-specific PCR, for example.

[0138] In one embodiment of the invention, diagnosis of a disease or condition associated with a SLIT-3 nucleic acid (e.g., Type II diabetes) or a susceptibility to a disease or condition associated with a SLIT-3 nucleic acid (e.g., Type II diabetes) can also be made by expression analysis by quantitative PCR (kinetic thermal cycling). This technique, utilizing TaqMan®, can be used to allow the identification of polymorphisms and whether a patient is homozygous or heterozygous. The technique can assess the presence of an alteration in the expression or composition of the polypeptide encoded by a SLIT-3 nucleic acid or splicing variants encoded by a SLIT-3 nucleic acid. Further, the expression of the variants can be quantified as physically or functionally different.

[0139] In another embodiment of the invention, diagnosis of Type II diabetes or a susceptibility to Type II diabetes 9or a condition associated with a SLIT-3 gene) can be made by examining expression and/or composition of a SLIT-3 polypeptide, by a variety of methods, including enzyme linked immunosorbent assays (ELISAs), Western blots, immunoprecipitations and immunofluorescence. A test sample from an individual is assessed for the presence of an alteration in the expression and/or an alteration in composition of the polypeptide encoded by a SLIT-3 nucleic acid, or for the presence of a particular variant encoded by a SLIT-3 nucleic acid. An alteration in expression of a polypeptide encoded by a SLIT-3 nucleic acid can be, for example, an alteration in the quantitative polypeptide expression (i.e., the amount of polypeptide produced); an alteration in the composition of a polypeptide encoded by a SLIT-3 nucleic acid is an alteration in the qualitative polypeptide expression (e.g., expression of an altered SLIT-3 polypeptide or of a different splicing variant). In a preferred embodiment diagnosis of the disease or condition associated with SLIT-3 nucleic acid or a susceptibility to a disease or condition associated with a SLIT-3 nucleic acid is made by detecting a particular splicing variant encoded by that SLIT-3 nucleic acid, or a particular pattern of splicing variants.

[0140] Both such alterations (quantitative and qualitative) can also be present. The term “alteration” in the polypeptide expression or composition, as used herein, refers to an alteration in expression or composition in a test sample, as compared with the expression or composition of polypeptide by a SLIT-3 nucleic acid in a control sample. A control sample is a sample that corresponds to the test sample (e.g., is from the same type of cells), and is from an individual who is not affected by a susceptibility to a disease or condition associated with a SLIT-3 nucleic acid. An alteration in the expression or composition of the polypeptide in the test sample, as compared with the control sample, is indicative of a susceptibility to a disease or condition associated with a SLIT-3 nucleic acid. Similarly, the presence of one or more different splicing variants in the test sample, or the presence of significantly different amounts of different splicing variants in the test sample, as compared with the control sample, is indicative of a disease or condition associated with a SLIT-3 nucleic acid or a susceptibility to a disease or condition associated with a SLIT-3 nucleic acid. Various means of examining expression or composition of the polypeptide encoded by a SLIT-3 nucleic acid can be used, including: spectroscopy, colorimetry, lectrophoresis, isoelectric focusing, and immunoassays (e.g., David et al., U.S. Pat. No. 4,376,110) such as immunoblotting (see also Current Protocols in Molecular Biology, particularly Chapter 10). For example, in one embodiment, an antibody capable of binding to the polypeptide (e.g., as described above), preferably an antibody with a detectable label, can be used. Antibodies can be polyclonal, or more preferably, monoclonal. An intact antibody, or a fragment thereof (e.g., Fab or F(ab′)₂) can be used. The term “labeled”, with regard to the probe or antibody, is intended to encompass direct labeling of the probe or antibody by coupling (i.e., physically linking) a detectable substance to the probe or antibody, as well as indirect labeling of the probe or antibody by reactivity with another reagent that is directly labeled. Examples of indirect labeling include detection of a primary antibody using a fluorescently labeled secondary antibody and end-labeling of a DNA probe with biotin such that it can be detected with fluorescently labeled streptavidin.

[0141] Western blotting analysis, using an antibody as described above that specifically binds to a polypeptide encoded by an altered SLIT-3 nucleic acid (e.g., a SLIT-3 nucleic acid having one or more alterations as shown in FIG. 11), or an antibody that specifically binds to a polypeptide encoded by a non-altered nucleic acid, or an antibody that specifically binds to a particular splicing variant encoded by a nucleic acid, can be used to identify the presence in a test sample of a particular splicing variant or of a polypeptide encoded by a polymorphic or altered SLIT-3 nucleic acid, or the absence in a test sample of a particular splicing variant or of a polypeptide encoded by a non-polymorphic or non-altered nucleic acid. The presence of a polypeptide encoded by a polymorphic or altered nucleic acid, or the absence of a polypeptide encoded by a non-polymorphic or non-altered nucleic acid, is diagnostic for a disease or condition associated with a SLIT-3 nucleic acid or a susceptibility to a disease or condition associated with a SLIT-3 nucleic acid (e.g. Type II diabetes), as is the presence (or absence) of particular splicing variants encoded by the SLIT-3 nucleic acid.

[0142] In one embodiment of this method, the level or amount of polypeptide encoded by a SLIT-3 nucleic acid in a test sample is compared with the level or amount of the polypeptide encoded by the SLIT-3 in a control sample. A level or amount of the polypeptide in the test sample that is higher or lower than the level or amount of the polypeptide in the control sample, such that the difference is statistically significant, is indicative of an alteration in the expression of the polypeptide encoded by the SLIT-3 nucleic acid, and is diagnostic for a disease or condition associated with a SLIT-3 nucleic acid or a susceptibility to a disease or condition associated with that SLIT-3 nucleic acid (e.g. Type II diabetes). Alternatively, the composition of the polypeptide encoded by a SLIT-3 nucleic acid in a test sample is compared with the composition of the polypeptide encoded by the SLIT-3 nucleic acid in a control sample (e.g., the presence of different splicing variants). A difference in the composition of the polypeptide in the test sample, as compared with the composition of the polypeptide in the control sample, is diagnostic for a disease or condition associated with a SLIT-3 nucleic acid or a susceptibility to a disease or condition associated with that SLIT-3 nucleic acid (e.g., Type II diabetes). In another embodiment, both the level or amount and the composition of the polypeptide can be assessed in the test sample and in the control sample. A difference in the amount or level of the polypeptide in the test sample, compared to the control sample; a difference in composition in the test sample, compared to the control sample; or both a difference in the amount or level, and a difference in the composition, is indicative of a disease or condition associated with a SLIT-3 nucleic acid or a susceptibility to a disease or condition associated with that SLIT-3 nucleic acid.

[0143] The invention further pertains to a method for the diagnosis or identification of a susceptibility to Type II diabetes in an individual, by identifying an at-risk haplotype. A “haplotype,” as described herein, refers to a combination of genetic markers (“alleles”), such as those set forth in FIG. 11. In a certain embodiment, the haplotype can comprise one or more alleles, two or more alleles, three or more alleles, four or more alleles, or five or more alleles. The genetic markers are particular “alleles” at “polymorphic sites” associated with SLIT3. A nucleotide position at which more than one sequence is possible in a population (either a natural population or a synthetic population, e.g., a library of synthetic molecules) is referred to herein as a “polymorphic site”. Where a polymorphic site is a single nucleotide in length, the site is referred to as a single nucleotide polymorphism (“SNP”). For example, if at a particular chromosomal location, one member of a population has an adenine and another member of the population has a thymine at the same position, then this position is a polymorphic site, and, more specifically, the polymorphic site is a SNP. Polymorphic sites can allow for differences in sequences based on substitutions, insertions or deletions. Each version of the sequence with respect to the polymorphic site is referred to herein as an “allele” of the polymorphic site. Thus, in the previous example, the SNP allows for both an adenine allele and a thymine allele.

[0144] Typically, a reference sequence is referred to for a particular sequence. Alleles that differ from the reference are referred to as “variant” alleles. For example, the reference SLIT3 sequence is described herein by SEQ ID NO: 1 (FIG. 1). The term, “variant SLIT3”, as used herein, refers to a sequence that differs from SEQ ID NO: 1 but is otherwise substantially similar. The genetic markers that make up the haplotypes described herein are SLIT3 variants. Additional variants can include changes that affect a polypeptide, e.g. the SLIT3 polypeptide. These sequence differences, when compared to a reference nucleotide sequence, can include the insertion or deletion of a single nucleotide, or of more than one nucleotide, resulting in a frame shift; the change of at least one nucleotide, resulting in a change in the encoded amino acid; the change of at least one nucleotide, resulting in the generation of a premature stop codon; the deletion of several nucleotides, resulting in a deletion of one or more amino acids encoded by the nucleotides; the insertion of one or several nucleotides, such as by unequal recombination or gene conversion, resulting in an interruption of the coding sequence of a reading frame; duplication of all or a part of a sequence; transposition; or a rearrangement of a nucleotide sequence, as described in detail above. Such sequence changes alter the polypeptide encoded by a SLIT3 nucleic acid. For example, if the change in the nucleic acid sequence causes a frame shift, the frame shift can result in a change in the encoded amino acids, and/or can result in the generation of a premature stop codon, causing generation of a truncated polypeptide. Alternatively, a polymorphism associated with Type II diabetes or a susceptibility to Type II diabetes can be a synonymous change in one or more nucleotides (i.e., a change that does not result in a change in the amino acid sequence). Such a polymorphism can, for example, alter splice sites, affect the stability or transport of mRNA, or otherwise affect the transcription or translation of the polypeptide. The polypeptide encoded by the reference nucleotide sequence is the “reference” polypeptide with a particular reference amino acid sequence, and polypeptides encoded by variant alleles are referred to as “variant” polypeptides with variant amino acid sequences.

[0145] Haplotypes are a combination of genetic markers, e.g., particular alleles at polymorphic sites. Haplotypes described herein, e.g., those shown in Tables 2 and 5, are found more frequently in individuals with Type II diabetes than in individuals without Type II diabetes. Therefore, these haplotypes have predictive value for detecting Type II diabetes or a susceptibility to Type II diabetes in an individual. The haplotypes described herein are a combination of various genetic markers, e.g., SNPs and microsatellites. Therefore, detecting haplotypes can be accomplished by methods known in the art for detecting sequences at polymorphic sites, such as the methods described above.

[0146] In certain methods described herein, an individual who is at risk for Type II diabetes is an individual in whom an at-risk haplotype is identified. In one embodiment, the at-risk haplotype is one that confers a significant risk of Type II diabetes. In one embodiment, significance associated with a haplotype is measured by an odds ratio. In a further embodiment, the significance is measured by a percentage. In one embodiment, a significant risk is measured as an odds ratio of at least about 1.2, including by not limited to: 1.2, 1.3, 1.4, 1.5, 1.6, 1.7, 1.8, and 1.9. In a further embodiment, an odds ratio of at least 1.2 is significant. In a further embodiment, an odds ratio of at least about 1.5 is significant. In a further embodiment, a significant increase in risk is at least about 1.7 is significant In a further embodiment, a significant increase in risk is at least about 20%, including but not limited to about 25%, 30%, 35%, 40%, 45%, 50%, 55%, 60%, 65%, 70%, 75%, 80%, 85%, 90%, 95%, and 98%. In a further embodiment, a significant increase in risk is at least about 50%. It is understood however, that identifying whether a risk is medically significant may also depend on a variety of factors, including the specific disease, the haplotype, and often, environmental factors.

[0147] The invention also pertains to methods of diagnosing Type II diabetes or a susceptibility to Type II diabetes in an individual, comprising screening for an at-risk haplotype in the SLIT-3 nucleic acid that is more frequently present in an individual susceptible to Type II diabetes (affected), compared to the frequency of its presence in a healthy individual (control), wherein the presence of the haplotype is indicative of Type II diabetes or susceptibility to Type II diabetes. Standard techniques for genotyping for the presence of SNPs and/or microsatellite markers that are associated with Type II diabetes can be used, such as fluorescent based techniques (Chen, et al., Genome Res. 9, 492 (1999), PCR, LCR, Nested PCR and other techniques for nucleic acid amplification. In a preferred embodiment, the method comprises assessing in an individual the presence or frequency of SNPs and/or microsatellites in the SLIT-3 nucleic acid that are associated with Type II diabetes, wherein an excess or higher frequency of the SNPs and/or microsatellites compared to a healthy control individual is indicative that the individual has Type II diabetes or is susceptible to Type II diabetes. See 4FIG. 11, for SNPs and markers that comprise haplotypes that can be used as screening tools. See also FIG. 11, which sets forth SNPs and markers for use in design of diagnostic tests for determining Type II diabetes or a susceptibility to Type II diabetes. For example, an at-risk haplotype can include microsatellite markers and/or SNPs such as those set forth in FIG. 11. The presence of the haplotype is diagnostic of Type II diabetes or of a susceptibility to Type II diabetes. Haplotype analysis involves defining a candidate susceptibility locus using LOD scores. The defined regions are then ultra-fine mapped with microsatellite markers with an average spacing between markers of less than 100 kb. All usable microsatellite markers that found in public databases and mapped within that region can be used. In addition, microsatellite markers identified within the deCODE genetics sequence assembly of the human genome can be used.

[0148] The frequencies of haplotypes in the patient and the control groups using an expectation-maximization algorithm can be estimated (Dempster A. et al., 1977. J. R. Stat. Soc. B, 39:1-389). An implementation of this algorithm that can handle missing genotypes and uncertainty with the phase can be used. Under the null hypothesis, the patients and the controls are assumed to have identical frequencies. Using a likelihood approach, an alternative hypothesis where a candidate at-risk-haplotype, which can include the markers described herein, is allowed to have a higher frequency in patients than controls, while the ratios of the frequencies of other haplotypes are assumed to be the same in both groups is tested. Likelihoods are maximized separately under both hypotheses and a corresponding 1-df likelihood ratio statistics is used to evaluate the statistic significance.

[0149] To look for at-risk-haplotypes in the 1-lod drop, for example, association of all possible combinations of genotyped markers is studied, provided those markers span a practical region. The combined patient and control groups can be randomly divided into two sets, equal in size to the original group of patients and controls. The haplotype analysis is then repeated and the most significant p-value registered is determined. This randomization scheme can be repeated, for example, over 100 times to construct an empirical distribution of p-values

[0150] The at-risk haplotypes identified in Table 2 (haplotypes identified as A1, A2, A3, A4, A5, A6, B1, B2, B3, D4 and B5) or Table 5 (haplotypes identified as C1, C2, C3, C4, and C5) are associated with Type II diabetes or a susceptibility to Type II diabetes. In certain embodiments, a haplotype associated with Type II diabetes or a susceptibility to Type II diabetes comprises markers DG5S879, DG5S881, D5S2075, DG5S883, DG5S38 at the 5q35 locus; comprises markers DG5S1058 and DG5S37 at the 5q35 locus; comprises markers DG5S1058, DG5S37, DG5SI01 at the 5q35 locus; comprises markers DG5S881, DG5S1058, D5S2075, DG5S883, DG5S38 at the 5q35 locus; comprises markers DG5S879, DG5S1058, DG5S37 at the 5q35 locus; comprises markers DG5S881, D5S2075, DG5S883, DG5S38 at the 5q35 locus; comprises markers DG5S953, DG5S955, DG5S13, DG5S959 at the 5q35 locus; comprises markers DG5S888 and DG5S953 at the 5q35 locus; comprises markers DG5S953, DG5S955, DG5S124 at the 5q35 locus; comprises markers DG5S888, DG5S44, DG5S953at the 5q35 locus; comprises markers DG5S953, DG5S955, DG5S13, DG5S123, DG5S959 at the 5q35 locus; comprises markers DG5S881, SLT_{—}90256, SLT_{—}89801, SLT_{—}8967, SLT_{—}278 at the 5q35 locus; comprises markers DG5S881, SLT_{—}89801, DG5S1645, SLT_{—}8967, SLT_{—}278 at the 5q35 locus; comprises markers DG5S881, SLT_{—}89801, DG5S1645, SLT_{—}8967, SLT_{—}8778 at the 5q35 locus; comprises markers DG5S881, SLT_{—}90256, SLT_{—}89801, SLT_{—}8967, SLT_{—}8778 at the 5q35 locus; or comprises markers DG5S881, rs297898, SLT_{—}89801, DG5S1645, SLT_{—}8967 at the 5q35 locus.

[0151] The presence of the haplotype is diagnostic of Type II diabetes or of a susceptibility to Type II diabetes.

[0152] In particular embodiments, the presence of the haplotype 0, 4, −4, 0, 4 at DG5S879, DG5S881, D5S2075, DG5S883, DG5S38; of the haplotype 4, −6 at DG5S1058 and DG5S37; of the haplotype 4, −6, 0 at DG5S1058, DG5S37, DG5S101; of the haplotype 4, 4, −4, 0, 4 at DG5S881, DG5S1058, D5S2075, DG5S883, DG5S38; of the haplotype 0, 4, −6 at DG5S879, DG5S1058, DG5S37; of the haplotype 4, −4, 0, 4 at DG5S881, D5S2075, DG5S883, DG5S38; of the haplotype 0, 0, 0, 5 at DG5S953, DG5S955, DG5S13, DG5S959, of the haplotype 27, 0 at DG5S888 and DG5S953; of the haplotype 0, 0, 4 at DG5S953, DG5S955, DG5S124; of the haplotype 27, 0, 0 at DG5S888, DG5S44, DG5S953; of the haplotype 0, 0, 0, 0, 5 at DG5S953, DG5S955, DG5S13, DG5S123, DG5S959; of the haplotype 4, G, G, C, G at DG5S881, SLT_{—}90256, SLT_{—}89801, SLT_{—}8967, SLT_{—}278; of the haplotype 4, G, 0, C, G at DG5S881, SLT_{—}89801, DG5S1645, SLT_{—}8967, SLT_{—}278; of the haplotype 4, G, 0, C, T at DG5S881, SLT_{—}89801, DG5S1645, SLT_{—}8967, SLT_{—}8778; of the haplotype 4, G, G, C, T at DG5S881, SLT_{—}90256, SLT_{—}89801, SLT_{—}8967, SLT_{—}8778; of the haplotype at 4, T, G, 0, C DG5S881, rs297898, SLT_{—}89801, DG5S1645, SLT_{—}8967; is diagnostic of Type U diabetes or of susceptibility to Type II diabetes.

[0153] In another embodiment, the at-risk haplotype is characterized by a significant marker and SNP haplotype defined by the following microsatellite markers and SNPs: one or more of the markers set forth in the haplotypes in Table 2 and/or Table 5, and/or one ore more of the markers set forth in Table 4. These markers and SNPs represent an at-risk haplotype which can be used to design diagnostic tests for determining Type II diabetes or a susceptibility to Type II diabetes, as described above.

[0154] In another embodiment, the at-risk haplotype is the presence of polymorphism(s) represented in FIG. 11. The SNPs are characterized by the position indicated in FIG. 11 and the alleles indicated.

[0155] Kits (e.g., reagent kits) useful in the methods of diagnosis comprise components useful in any of the methods described herein, including for example, hybridization probes or primers as described herein (e.g., labeled probes or primers), reagents for detection of labeled molecules, restriction enzymes (e.g., for RFLP analysis), allele-specific oligonucleotides, antibodies which bind to altered or to non-altered (native) SLIT-3 polypeptide, means for amplification of nucleic acids comprising a SLIT-3, or means for analyzing the nucleic acid sequence of a SLIT-3 nucleic acid or for analyzing the amino acid sequence of a SLIT-3 polypeptide as described herein, etc. In one embodiment, the kit for diagnosing a Type II diabetes or a susceptibility to Type II diabetes can comprise primers for nucleic acid amplification of a region in the SLIT-3 nucleic acid comprising an at-risk haplotype that is more frequently present in an individual having Type II diabetes or is susceptible to Type II diabetes. The primers can be designed using portions of the nucleic acids flanking SNPs that are indicative of Type II diabetes. In a certain embodiment, the primers are designed to amplify regions of the SLIT gene associated with an at-risk haplotype for Type II diabetes, shown in FIG. 11, or more particularly the haplotype comprising the following markers and SNPs: one or more of the markers set forth in the haplotypes in Table 2 and/or Table 5, and/or one ore more of the markers set forth in Table 4, in the locus of 5q35.

Screening Assay and Agents Identified Thereby

[0156] The invention provides methods (also referred to herein as “screening assays”) for identifying the presence of a nucleotide that hybridizes to a nucleic acid of the invention, as well as for identifying the presence of a polypeptide encoded by a nucleic acid of the invention. In one embodiment, the presence (or absence) of a nucleic acid molecule of interest (e.g., a nucleic acid that has significant homology with a nucleic acid of the invention) in a sample can be assessed by contacting the sample with a nucleic acid comprising a nucleic acid of the invention (e.g., a nucleic acid having the sequence of one of the sequences shown in FIG. 10, or the complement thereof, or a nucleic acid encoding an amino acid having the sequence of one of the sequences shown in FIG. 10, or a fragment or variant of such nucleic acids), under stringent conditions as described above, and then assessing the sample for the presence (or absence) of hybridization. In one embodiment, high stringency conditions are conditions appropriate for selective hybridization. In another embodiment, a sample containing the nucleic acid molecule of interest is contacted with a nucleic acid containing a contiguous nucleotide sequence (e.g., a primer or a probe as described above) that is at least partially complementary to a part of the nucleic acid molecule of interest (e.g., a SLIT-3 nucleic acid), and the contacted sample is assessed for the presence or absence of hybridization. In another embodiment, the nucleic acid containing a contiguous nucleotide sequence is completely complementary to a part of the nucleic acid molecule of interest.

[0157] In any of these embodiments, all or a portion of the nucleic acid of interest can be subjected to amplification prior to performing the hybridization.

[0158] In another embodiment, the presence (or absence) of a polypeptide of interest, such as a polypeptide of the invention or a fragment or variant thereof, in a sample can be assessed by contacting the sample with an antibody that specifically hybridizes to the polypeptide of interest (e.g., an antibody such as those described above), and then assessing the sample for the presence (or absence) of binding of the antibody to the polypeptide of interest.

[0159] In another embodiment, the invention provides methods for identifying agents (e.g., fusion proteins, polypeptides, peptidomimetics, prodrugs, receptors, binding agents, antibodies, small molecules or other drugs, or ribozymes which alter (e.g., increase or decrease) the activity of the polypeptides described herein, or which otherwise interact with the polypeptides herein. For example, such agents can be agents which bind to polypeptides described herein (e.g., SLIT-3 binding agents); which have a stimulatory or inhibitory effect on, for example, activity of polypeptides of the invention; or which change (e.g., enhance or inhibit) the ability of the polypeptides of the invention to interact with SLIT-3 binding agents (e.g., receptors or other binding agents); or which alter posttranslational processing of a SLIT-3 polypeptide (e.g., agents that alter proteolytic processing to direct the polypeptide from where it is normally synthesized to another location in the cell, such as the cell surface; agents that alter proteolytic processing such that more polypeptide is released from the cell, etc.

[0160] In one embodiment, the invention provides assays for screening candidate or test agents that bind to or modulate the activity of polypeptides described herein (or biologically active portion(s) thereof), as well as agents identifiable by the assays. Test agents can be obtained using any of the numerous approaches in combinatorial library methods known in the art, including: biological libraries; spatially addressable parallel solid phase or solution phase libraries; synthetic library methods requiring deconvolution; the ‘one-bead one-compound’ library method; and synthetic library methods using affinity chromatography selection. The biological library approach is limited to polypeptide libraries, while the other four approaches are applicable to polypeptide, non-peptide oligomer or small molecule libraries of compounds (Lam, K. S., Anticancer Drug Des. 12:145 (1997)).

[0161] In one embodiment, to identify agents which alter the activity of a SLIT-3 polypeptide, a cell, cell lysate, or solution containing or expressing a SLIT-3 polypeptide, or another splicing variant encoded by a SLIT-3 nucleic acid (such as a nucleic acid comprising one or more polymorphism(s) as shown in FIG. 11), or a fragment or derivative thereof (as described above), can be contacted with an agent to be tested; alternatively, the polypeptide can be contacted directly with the agent to be tested. The level (amount) of SLIT-3 activity is assessed (e.g., the level (amount) of SLIT-3 activity is measured, either directly or indirectly), and is compared with the level of activity in a control (i.e., the level of activity of the SLIT-3 polypeptide or active fragment or derivative thereof in the absence of the agent to be tested). If the level of the activity in the presence of the agent differs, by an amount that is statistically significant, from the level of the activity in the absence of the agent, then the agent is an agent that alters the activity of a SLIT-3 polypeptide. An increase in the level of SLIT-3 activity relative to a control indicates that the agent is an agent that enhances (is an agonist of) SLIT-3 activity. Similarly, a decrease in the level of SLIT-3 activity relative to a control indicates that the agent is an agent that inhibits (is an antagonist of) SLIT-3 activity. In another embodiment, the level of activity of a SLIT-3 polypeptide or derivative or fragment thereof in the presence of the agent to be tested, is compared with a control level that has previously been established. A level of the activity in the presence of the agent that differs from the control level by an amount that is statistically significant indicates that the agent alters SLIT-3 activity.

[0162] The present invention also relates to an assay for identifying agents which alter the expression of a SLIT-3 nucleic acid (e.g., antisense nucleic acids, fusion proteins, polypeptides, peptidomimetics, prodrugs, receptors, binding agents, antibodies, small molecules or other drugs, or ribozymes) which alter (e.g., increase or decrease) expression (e.g., transcription or translation) of the gene or which otherwise interact with the nucleic acids described herein, as well as agents identifiable by the assays. For example, a solution containing a nucleic acid encoding a SLIT-3 polypeptide (e.g., a SLIT-3 nucleic acid) can be contacted with an agent to be tested. The solution can comprise, for example, cells containing the nucleic acid or cell lysate containing the nucleic acid; alternatively, the solution can be another solution that comprises elements necessary for transcription/translation of the nucleic acid. Cells not suspended in solution can also be employed, if desired. The level and/or pattern of SLIT-3 expression (e.g., the level and/or pattern of mRNA or of protein expressed, such as the level and/or pattern of different splicing variants) is assessed, and is compared with the level and/or pattern of expression in a control (i.e., the level and/or pattern of the SLIT-3 expression in the absence of the agent to be tested). If the level and/or pattern in the presence of the agent differ, by an amount or in a manner that is statistically significant, from the level and/or pattern in the absence of the agent, then the agent is an agent that alters the expression of a Type II diabetes gene. Enhancement of SLIT-3 expression indicates that the agent is an agonist of SLIT-3 activity. Similarly, inhibition of SLIT-3 expression indicates that the agent is an antagonist of SLIT-3 activity. In another embodiment, the level and/or pattern of SLIT-3 polypeptide(s) (e.g., different splicing variants) in the presence of the agent to be tested, is compared with a control level and/or pattern that have previously been established A level and/or pattern in the presence of the agent that differs from the control level and/or pattern by an amount or in a manner that is statistically significant indicates that the agent alters SLIT-3 expression.

[0163] In another embodiment of the invention, agents which alter the expression of a SLIT-3 nucleic acid or which otherwise interact with the nucleic acids described herein, can be identified using a cell, cell lysate, or solution containing a nucleic acid encoding the promoter region of the SLIT-3 nucleic acid operably linked to a reporter gene. After contact with an agent to be tested, the level of expression of the reporter gene (e.g., the level of mRNA or of protein expressed) is assessed, and is compared with the level of expression in a control (i.e., the level of the expression of the reporter gene in the absence of the agent to be tested). If the level in the presence of the agent differs, by an amount or in a manner that is statistically significant, from the level in the absence of the agent, then the agent is an agent that alters the expression of the SLIT-3, as indicated by its ability to alter expression of a gene that is operably linked to the SLIT-3 nucleic acid promoter. Enhancement of the expression of the reporter indicates that the agent is an agonist of SLIT-3. Similarly, inhibition of the expression of the reporter indicates that the agent is an antagonist of SLIT-3. In another embodiment, the level of expression of the reporter in the presence of the agent to be tested is compared with a control level that has previously been established. A level in the presence of the agent that differs from the control level by an amount or in a manner that is statistically significant indicates that the agent alters expression.

[0164] Agents which alter the amounts of different splicing variants encoded by a SLIT-3 nucleic acid (e.g., an agent which enhances activity of a first splicing variant, and which inhibits activity of a second splicing variant), as well as agents which are agonists of activity of a first splicing variant arid antagonists of activity of a second splicing variant, can easily be identified using these methods described above.

[0165] In other embodiments of the invention, assays can be used to assess the impact of a test agent on the activity of a polypeptide in relation to a SLIT-3 binding agent. For example, a cell that expresses a compound that interacts with a SLIT-3 polypeptide (herein referred to as a “SLIT-3 binding agent”, which can be a polypeptide or other molecule that interacts with a SLIT-3 polypeptide, such as a receptor) is contacted with a SLIT-3 in the presence of a test agent, and the ability of the test agent to alter the interaction between the SLIT-3 and the SLIT-3 binding agent is determined. Alternatively, a cell lysate or a solution containing the SLIT-3 binding agent, can be used. An agent which binds to the SLIT-3 or the SLIT-3 binding agent can alter the interaction by interfering with, or enhancing the ability of the SLIT-3 to bind to, associate with, or otherwise interact with the SLIT-3 binding agent. Determining the ability of the test agent to bind to a SLIT-3 polypeptide or a SLIT-3 binding agent can be accomplished, for example, by coupling the test agent with a radioisotope or enzymatic label such that binding of the test agent to the polypeptide can be determined by detecting the labeled with ¹²⁵I, ³⁵S, ¹⁴C or ³H, either directly or indirectly, and the radioisotope detected by direct counting of radioemmission or by scintillation counting. Alternatively, test agents can be enzymatically labeled with, for example, horseradish peroxidase, alkaline phosphatase, or luciferase, and the enz [symbol] conversion of an appropriate substrate to product. It is also within the scope of this invention to determine the ability of a test agent to interact with the polypeptide without the labeling of any of the interactants. For example, a microphysiometer can be used to detect the interaction of a test agent with a SLIT-3 nucleic acid or a SLIT-3 binding agent without the labeling of the test agent, SLIT-3 nucleic acid, or the SLIT-3 binding agent. McConnell, H. M. et al., Science 257:1906-1912 (1992). As used herein, a “microphysiometer” (e.g., Cytosensor™) is an analytical instrument that measures the rate at which a cell acidifies its environment using a light-addressable potentiometric sensor (LAPS). Changes in this acidification rate can be used as an indicator of the interaction between ligand and polypeptide.

[0166] Thus, these receptors can be used to screen for compounds that are agonists or antagonists, for use in treating a disease or condition associated with a SLIT-3 gene, or for treating a susceptibility to a disease or condition associated with a SLIT-3 gene (e.g., Type II diabetes). Drugs can be designed to regulate SLIT-3 activation that in turn can be used to regulate signaling pathways and transcription events of genes downstream, or to alter interaction of proteins or polypeptides with SLIT-3.

[0167] In another embodiment of the invention, assays can be used to identify polypeptides that interact with one or more SLIT-3 polypeptides, as described herein. For example, a yeast two-hybrid system such as that described by Fields and Song (Fields, S. and Song, O., Nature 340:245-246 (1989)) can be used to identify polypeptides that interact with one or more SLIT-3 polypeptides. In such a yeast two-hybrid system, vectors are constructed based on the flexibility of a transcription factor that has two functional domains (a DNA binding domain and a transcription activation domain). If the two domains are separated but fused to two different proteins that interact with one another, transcriptional activation can be achieved, and transcription of specific markers (e.g., nutritional markers such as His and Ade, or color markers such as lacZ) can be used to identify the presence of interaction and transcriptional activation. For example, in the methods of the invention, a first vector is used which includes a nucleic acid encoding a DNA binding domain and also a SLIT-3 polypeptide, splicing variant, or fragment or derivative thereof, and a second vector is used which includes a nucleic acid encoding a transcription activation domain and also a nucleic acid encoding a polypeptide which potentially may interact with the SLIT-3 polypeptide, splicing variant, or fragment or derivative thereof (e.g., a SLIT-3 polypeptide binding agent or receptor). Incubation of yeast containing the first vector and the second vector under appropriate conditions (e.g., mating conditions such as used in the Matchmaker™ system from Clontech (Palo Alto, Calif., USA)) allows identification of colonies that express the markers of interest. These colonies can be examined to identify the polypeptide(s) that interact with the SLIT-3 polypeptide or fragment or derivative thereof. Such polypeptides may be useful as agents that alter the activity of expression of a SLIT-3 polypeptide, as described above.

[0168] In more than one embodiment of the above assay methods of the present invention, it may be desirable to immobilize either the SLIT-3 nucleic acid, the SLIT-3 binding agent, or other components of the assay on a solid support, in order to facilitate separation of complexed from uncomplexed forms of one or both of the polypeptides, as well as to accommodate automation of the assay. Binding of a test agent to the polypeptide, or interaction of the polypeptide with a binding agent in the presence and absence of a test agent, can be accomplished in any vessel suitable for containing the reactants. Examples of such vessels include microtitre plates, test tubes, and micro-centrifuge tubes. In one embodiment, a fusion protein (e.g. a glutathione-S-transferase fusion protein) can be provided which adds a domain that allows a SLIT-3 nucleic acid or a SLIT-3 binding agent to be bound to a matrix or other solid support.

[0169] In another embodiment, modulators of expression of nucleic acid molecules of the invention are identified in a method wherein a cell, cell lysate, or solution containing a nucleic acid encoding a SLIT-3 is contacted with a test agent and the expression of appropriate mRNA or polypeptide (e.g. splicing variant(s)) in the cell, cell lysate, or solution, is determined. The level of expression of appropriate mRNA or polypeptide(s) in the presence of the test agent is compared to the level of expression of mRNA or polypeptide(s) in the absence of the test agent. The test agent can then be identified as a modulator of expression based on this comparison. For example, when expression of mRNA or polypeptide is greater (statistically significantly greater) in the presence of the test agent than in its absence, the test agent is identified as a stimulator or enhancer of the mRNA or polypeptide expression Alternatively, when expression of the mRNA or polypeptide is less (statistically significantly less) in the presence of the test agent than in its absence, the test agent is identified as an inhibitor of the mRNA or polypeptide expression. The level of mRNA or polypeptide expression in the cells can be determined by methods described herein for detecting mRNA or polypeptide.

[0170] This invention further pertains to novel agents identified by the above-described screening assays. Accordingly, it is within the scope of this invention to further use an agent identified as described herein in an appropriate animal model. For example, an agent identified as described herein (e.g., a test agent that is a modulating agent, an antisense nucleic acid molecule, a specific antibody, or a polypeptide-binding agent) can be used in an animal model to determine the efficacy, toxicity, or side effects of treatment with such an agent Alternatively, an agent identified as described herein can be used in an animal model to determine the mechanism of action of such an agent.

[0171] Furthermore, this invention pertains to uses of novel agents identified by the above-described screening assays for treatments as described herein, as well as for the manufacture of medicaments for use in treatment, such as in the treatments described herein. In addition, an agent identified as described herein can be used to alter activity of a polypeptide encoded by a SLIT-3 nucleic acid, or to alter expression of a SLIT-3 nucleic acid, by contacting the polypeptide or the nucleic acid (or contacting a cell comprising the polypeptide or the nucleic acid) with the agent identified as described herein.

Pharmaceutical Compositions

[0172] The present invention also pertains to pharmaceutical compositions comprising nucleic acids described herein, particularly nucleotides encoding the polypeptides described herein; comprising polypeptides described herein and/or comprising other splicing variants encoded by a SLIT-3 nucleic acid; and/or an agent that alters (e.g., enhances or inhibits) SLIT-3 nucleic acid expression or SLIT-3 polypeptide activity as described herein. For instance, a polypeptide, protein (e.g. a SLIT-3 nucleic acid receptor), an agent that alters SLIT-3 nucleic acid expression, or a SLIT-3 binding agent or binding partner, fragment, fusion protein or pro-drug thereof, or a nucleotide or nucleic acid construct (vector) comprising a nucleotide of the present invention, or an agent that alters SLIT-3 polypeptide activity, can be formulated with a physiologically acceptable carrier or excipient to prepare a pharmaceutical composition. The carrier and composition can be sterile. The formulation should suit the mode of administration.

[0173] Suitable pharmaceutically acceptable carriers include but are not limited to water, salt solutions (e.g., NaCl), saline, buffered saline, alcohols, glycerol, ethanol, gum arabic, vegetable oils, benzyl alcohols, polyethylene glycols, gelatin, carbohydrates such as lactose, amylose or starch, dextrose, magnesium stearate, talc, silicic acid, viscous paraffin, perfume oil, fatty acid esters, hydroxymetaylcellulose, polyvinyl pyrolidone, etc., as well as combinations thereof. The pharmaceutical preparations can, if desired, be mixed with auxiliary agents, e.g., lubricants, preservatives, stabilizers, wetting agents, emulsifiers, salts for influencing osmotic pressure, buffers, coloring, flavoring and/or aromatic substances and the like which do not deleteriously react with the active agents.

[0174] The composition, if desired, can also contain minor amounts of wetting or emulsifying agents, or pH buffering agents. The composition can be a liquid solution, suspension, emulsion, tablet pill, capsule, sustained release formulation, or powder. The composition can be formulated as a suppository, with traditional binders and carriers such as triglycerides. Oral formulation can include standard carriers such as pharmaceutical grades of mannitol, lactose, starch, magnesium stearate, polyvinyl pyrollidone, sodium saccharine, cellulose, magnesium carbonate, etc.

[0175] Methods of introduction of these compositions include, but are not limited to, intradermal, intramuscular, intraperitoneal, intraocular, intravenous, subcutaneous, topical, oral and intranasal. Other suitable methods of introduction can also include gene therapy (as described below), rechargeable or biodegradable devices, particle acceleration devises (“gene guns”) and slow release polymeric devices. The pharmaceutical compositions of this invention can also be administered as part of a combinatorial therapy with other agents.

[0176] The composition can be formulated in accordance with the routine procedures as a pharmaceutical composition adapted for administration to human beings. For example, compositions for intravenous administration typically are solutions in sterile isotonic aqueous buffer. Where necessary, the composition may also include a solubilizing agent and a local anesthetic to ease pain at the site of the injection. Generally, the ingredients are supplied either separately or mixed together in unit dosage form, for example, as a dry lyophilized powder or water free concentrate in a hermetically sealed container such as an ampule or sachette indicating the quantity of active agent. Where the composition is to be administered by infusion, it can be dispensed with an infusion bottle containing sterile pharmaceutical grade water, saline or dextrose/water. Where the composition is administered by injection, an ampule of sterile water for injection or saline can be provided so that the ingredients may be mixed prior to administration.

[0177] For topical application, nonsprayable forms, viscous to semi-solid or solid forms comprising a carrier compatible with topical application and having a dynamic viscosity preferably greater than water, can be employed. Suitable formulations include but are not limited to solutions, suspensions, emulsions, creams, ointments, powders, enemas, lotions, sols, liniments, salves, aerosols, etc., which are, if desired, sterilized or mixed with auxiliary agents, e.g., preservatives, stabilizers, wetting agents, buffers or salts for influencing osmotic pressure, etc. The agent may be incorporated into a cosmetic formulation. For topical application, also suitable are sprayable aerosol preparations wherein the active ingredient, preferably in combination with a solid or liquid inert carrier material, is packaged in a squeeze bottle or in admixture with a pressurized volatile, normally gaseous propellant, e.g., pressurized air.

[0178] Agents described herein can be formulated as neutral or salt forms.

[0179] Pharmaceutically acceptable salts include those formed with free amino groups such as those derived from hydrochloric, phosphoric, acetic, oxalic, tartaric acids, etc., and those formed with free carboxyl groups such as those derived from sodium, potassium, ammonium, calcium, ferric hydroxides, isopropylamine, triethylamine, 2-ethylamino ethanol, histidine, procaine, etc.

[0180] The agents are administered in a therapeutically effective amount. The amount of agents which will be therapeutically effective in the treatment of a particular disorder or condition will depend on the nature of the disorder or condition, and can be determined by standard clinical techniques. In addition, in vitro or in vivo assays may optionally be employed to help identify optimal dosage ranges. The precise dose to be employed in the formulation will also depend on the route of administration, and the seriousness of the symptoms of disease, and should be decided according to the judgment of a practitioner and each patient's circumstances. Effective doses may be extrapolated from dose-response curves derived from in vitro or animal model test systems.

[0181] The invention also provides a pharmaceutical pack or kit comprising one or more containers filled with one or more of the ingredients of the pharmaceutical compositions of the invention. Optionally associated with such container(s) can be a notice in the form prescribed by a governmental agency regulating the manufacture, use or sale of pharmaceuticals or biological products, which notice reflects approval by the agency of manufacture, use of sale for human administration. The pack or kit can be labeled with information regarding mode of administration, sequence of drug administration (e.g., separately, sequentially or concurrently), or the like. The pack or kit may also include means for reminding the patient to take the therapy. The pack or kit can be a single unit dosage of the combination therapy or it can be a plurality of unit dosages. In particular, the agents can be separated, mixed together in any combination, present in a single vial or tablet. Agents assembled in a blister pack or other dispensing means is preferred. For the purpose of this invention, unit dosage is intended to mean a dosage that is dependent on the individual pharmacodynamics of each agent and administered in FDA approved dosages in standard time courses.

Method of Therapy

[0182] The present invention also pertains to methods of treatment (prophylactic and/or therapeutic) for certain diseases and conditions associated with SLIT-3 or with members of the Roundabout or Robo family. This family includes polypeptides (e.g., receptors for robo 1, robo 2 and rig. 1) and other molecules that are associated with the interaction of SLIT-3 and members of the Robo family. The invention additionally pertains to use of polypeptides and other molecules that are associated with the interaction of SLIT-3 and members of the Robo family, for the manufacture of a medicament, such as for the treatment for certain diseases and conditions associated with SLIT-3 or with members of the Roundabout or Robo family, as described herein.

[0183] In particular, the invention relates to methods of treatment for Type II diabetes or a susceptibility to Type II diabetes, using a Type II diabetes therapeutic agent. A “Type II diabetes therapeutic agent” is an agent that alters (e.g., enhances or inhibits) SLIT-3 polypeptide activity and/or SLIT-3 nucleic acid expression, as described herein (e.g., a Type II diabetes nucleic acid agonist or antagonist). In certain embodiments, the Type II diabetes [symbol] activity and/or nucleic acid expression of SLIT-3 or members of the Robo receptor family, or alters the interaction between SLIT-3 and members of the Robo family.

[0184] Type II diabetes therapeutic agents can alter SLIT-3 polypeptide activity or nucleic acid expression by a variety of means, such as, for example, by providing additional SLIT-3 polypeptide or Robo family polypeptide or by upregulating the transcription or translation of the SLIT-3 nucleic acid or a nucleic acid encoding a polypeptide that is a member of the Robo family; by altering posttranslational processing of the SLIT-3 polypeptide or Robo family polypeptide; by altering transcription of SLIT-3 or Robo family splicing variants; or by interfering with SLIT-3 polypeptide activity (e.g., by binding to a SLIT-3 polypeptide), or by binding to another polypeptide that interacts with a member of the Robo family, by altering (e.g., downregulating) the expression, transcription or translation of a SLIT-3 nucleic acid, by altering the interaction of a SLIT-3 nucleic acid with a member of the Robo family (e.g., interaction between SLIT-3 and one or more of the members of the Robo family, for example, the robo 1 receptor, the robo 2 receptor and the rig-1 receptor); or by altering (e.g., agonizing or antagonizing) activity of a member of the Robo family.

[0185] Representative Type II diabetes therapeutic agents include the following:
[0186] nucleic acids or fragments or derivatives thereof described herein, particularly nucleotides encoding the polypeptides described herein and vectors comprising such nucleic acids (e.g., a gene, cDNA, and/or mRNA, such as a nucleic acid encoding a SLIT-3 polypeptide or active fragment or derivative thereof, or an oligonucleotide; or a complement thereof, or fragments or derivatives thereof, and/or other splicing variants encoded by a Type II diabetes nucleic acid, or fragments or derivatives thereof);
[0187] nucleic acids encoding a member of the Robo family, or fragments or derivatives thereof, including nucleic acids encoding robo 1, robo 2 or rig-1 or Robo family polypeptides, and vectors comprising such nucleic acids (e.g., a gene, nucleic acid, cDNA, and /or mRNA, or a nucleic acid encoding an active fragment or derivative thereof, or an oligonucleotide;
[0188] polypeptides described herein and/or splicing variants encoded by the SLIT-3 nucleic acid or fragments or derivatives thereof;
[0189] polypeptides encoded by genes for the members of the Robo family (e.g., robo 1), or fragments or derivatives thereof;
[0190] other polypeptides (e.g., SLIT-3 receptors, Robo family receptors, such as robo 1 receptor, robo 2 receptor and rig-1); SLIT-3 binding agents; binding agents of the Robo family, or affect (e.g., increase or decrease) activity of a member of the Robo family,
[0191] antibodies, such as an antibody to an altered SLIT-3 polypepted, or an antibody to a non-altered SLIT-3 polypeptide, or an antibody to a particular splicing variant encoded by a SLIT-3 nucleic acid as described above; or antibodies to members of the Robo family, such as an antibody to an altered robo 1 polypeptide, or an antibody to a non-altered robo 1 polypeptide, or an antibody to a particular splicing variant of robo 1;
[0192] peptidomimetics; fusion proteins or prodrugs thereof; ribozymes; other small molecules; and
[0193] other agents that alter (e.g., enhance or inhibit) expression of a SLIT-3 nucleic acid or a member of the Robo family or polypeptide activity, or that regulate transcription of SLIT-3 splicing variants or Robo family polypeptide variants (e.g., agents that affect which splicing variants are expressed, or that affect the amount of each splicing variant that is expressed).

[0194] More than one Type II diabetes therapeutic agent can be used concurrently, if desired.

[0195] A Type II diabetes nucleic acid therapeutic agent that is a nucleic acid is used in the treatment of Type II diabetes or in the treatment for a susceptibility to Type II diabetes. The term, “treatment” as used herein, refers not only to ameliorating symptoms associated with the disease or condition, but also preventing or delaying the onset of the disease or condition, and also lessening the severity or frequency of symptoms of the disease or condition. The therapy is designed to alter (e.g., inhibit or enhance), replace or supplement activity of a SLIT-3 polypeptide or a Robo family polypeptide in an individual. For example, a Type II diabetes therapeutic agent can be administered in order to upregulate or increase the expression or availability of the SLIT-3 nucleic acid or of specific splicing variants of SLIT-3 nucleic acid, or, conversely, to downregulate or decrease the expression or availability of the SLIT-3 nucleic acid or specific splicing variants of the SLIT-3 nucleic acid. Upregulation or increasing expression or availability of a native SLIT-3 gene or nucleic acid or of a particular splicing variant could interfere with or compensate for the expression or activity of a defective gene or another splicing variant; downregulation or decreasing expression or availability of a native SLIT-3 gene or of a particular splicing variant could minimize the expression or activity of a defective gene or the particular splicing variant and thereby minimize the impact of the defective gene or the particular splicing variant. Similarly, for example a Type II diabetes therapeutic agent can be administered in order to upregulate or increase the expression or availability of the nucleic acid encoding a member of the Robo family or of specific splicing variants of a Robo family member, or, conversely, to downregulate or decrease the expression or availability of the nucleic acid encoding a Robo family member or specific splicing variant of the nucleic acid encoding a Robo family member.

[0196] The Type II diabetes therapeutic agent(s) are administered in a therapeutically effective amount (i.e., an amount that is sufficient to treat the disease, such as by ameliorating symptoms associated with the disease, preventing or delaying the onset of the disease, and/or also lessening the severity or frequency of symptoms of the disease). The amount which will be therapeutically effective in the treatment of a particular individual's disorder or condition will depend on the symptoms and severity of the disease, and can be determined by standard clinical techniques. In addition, in vitro or in vivo assays may optionally be employed to help identify optimal dosage ranges. The precise dose to be employed in the formulation will also depend on the route of administration, and the seriousness of the disease or disorder, and should be decided according to the judgment of a practitioner and each patient's circumstances. Effective doses may be extrapolated from dose-response curves derived from in vitro or animal model test systems.

[0197] In one embodiment, a nucleic acid of the invention (e.g., a nucleic acid encoding a SLIT-3 polypeptide, such as one of the sequences shown in FIG. 10, or a complement thereof; or another nucleic acid that encodes a SLIT-3 polypeptide or a splicing variant, derivative or fragment thereof, can be used, either alone or in a pharmaceutical composition as described above. For example, a SLIT-3 gene or nucleic acid or a cDNA encoding a SLIT-3 polypeptide, either by itself or included within a vector, can be introduced into cells (either in vitro or in vivo) such that the cells produce native SLIT-3 polypeptide. If necessary, cells that have been transformed with the gene or cDNA or a vector comprising the gene, nucleic acid or cDNA can be introduced (or re-introduced) into an individual affected with the disease. Thus, cells which, in nature, lack native SLIT-3 expression and activity, or have altered SLIT-3 expression and activity, or have expression of a disease-associated SLIT-3 splicing variant, can be engineered to express the SLIT-3 polypeptide or an active fragment of the SLIT-3 polypeptide (or a different variant of the SLIT-3 polypeptide). In certain embodiments, nucleic acids encoding a SLIT-3 polypeptide, or an active fragment or derivative thereof, can be introduced into an expression vector, such as a viral vector, and the vector can be introduced into appropriate cells in an animal. Other gene transfer systems, including viral and nonviral transfer systems, can be used. Alternatively, nonviral gene transfer methods, such as calcium phosphate coprecipitation, mechanical techniques (e.g. microinjection); membrane fusion-mediated transfer via liposomes; or direct DNA uptake, can also be used.

[0198] In another embodiment, a nucleic acid encoding a Robo family polypeptide, or a splicing variant, derivative or fragment thereof, can be used, either alone or in a pharmaceutical composition as described above. For example, the nucleic acid, either by itself or included within a vector, can be introduced into cells (either in vitro or in vivo) such that the cells produce native Robo family polypeptide. If necessary, cells that have been transformed with the gene or cDNA or a vector comprising the gene, nucleic acid or cDNA can be introduced (or re-introduced) into an individual affected with the disease. Thus, cells which, in nature, lack native Robo family polypeptide expression and activity, or have altered Robo family polypeptide expression and activity, or have expression of a disease-associated Robo family polypeptide splicing variant, can be engineered to express the Robo family polypeptide or an active fragment of the Robo family polypeptide (or a different variant of the Robo family polypeptide). In certain embodiments, nucleic acids encoding a Robo family polypeptide, or an active fragment or derivative thereof, can be introduced into an expression vector, such as a viral vector, and the vector can be introduced into appropriate cells in an animal. Other gene transfer systems, including viral and nonviral transfer systems, can be used.

[0199] Alternatively, in another embodiment of the invention, a nucleic acid of the invention; a nucleic acid complementary to a nucleic acid of the invention; or a portion of such a nucleic acid (e.g. an oligonucleotide as described below); or a nucleic acid encoding a member of the Robo family, can be used in “antisense” therapy, in which a nucleic acid (e.g., an oligonucleotide) which specifically hybridizes to the mRNA and/or genomic DNA of a Type II diabetes gene is administered or generated in situ. The antisense nucleic acid that specifically hybridizes to the mRNA and/or DNA inhibits expression of the SLIT-3 polypeptide, e.g., by inhibiting translation and/or transcription. Binding of the antisense nucleic acid can be by conventional base pair complementarity, or, for example, in the case of binding to DNA duplexes, through specific interaction in the major groove of the double helix.

[0200] An antisense construct of the present invention can be delivered, for example, as an expression plasmid as described above. When the plasmid is transcribed in the cell, it produces RNA that is complementary to a portion of the mRNA and/or DNA which encodes the SLIT-3 polypeptide or Robo family polypeptide. Alternatively, the antisense construct can be an oligonucleotide probe that is generated ex vivo and introduced into cells; it then inhibits expression by hybridizing with the mRNA and/or genomic DNA of the polypeptide. In one embodiment, the oligonucleotide probes are modified oligonucleotides, which are resistant to endogenous nucleases, e.g., exonucleases and/or endonucleases, thereby rendering them stable in vivo. Exemplary nucleic acid molecules for use as antisense oligonucleotides are phosphoramidate, phosphorothioate and methylphosphonate analogs of DNA (see also U.S. Pat. Nos. 5,176,996; 5,264,564; and 5,256,775). Additionally, general approaches to constructing oligomers useful in antisense therapy are also described, for example, by Van der Krol et al. (Biotechniques 6:958-976 (1988)); and Stein et al. (Cancer Res. 48:2659-2668 (1988)). With respect to antisense DNA, oligodeoxyribonucleotides derived from the translation initiation site are preferred.

[0201] To perform antisense therapy, oligonucleotides (mRNA, cDNA or DNA) are designed that are complementary to mRNA encoding the SLIT-3. The antisense oligonucleotides bind to SLIT-3 mRNA transcripts and prevent translation. Absolute complementarity, although preferred, is not required. A sequence “complementary” to a portion of an RNA, as referred to herein, indicates that a sequence has sufficient complementarity to be able to hybridize with the RNA, forming a stable duplex; in the case of double-stranded antisense nucleic acids, a single strand of the duplex DNA may thus be tested, or triplex formation may be assayed. The ability to hybridize will depend on both the degree of complementarity and the length of the antisense nucleic acid, as described in detail above. Generally, the longer the hybridizing nucleic acid, the more base mismatches with an RNA it may contain and still form a stable duplex (or triplex, as the case may be). One skilled in the art can ascertain a tolerable degree of mismatch by use of standard procedures.

[0202] The oligonucleotides used in antisense therapy can be DNA, RNA, or chimeric mixtures or derivatives or modified versions thereof, single-stranded or double-stranded. The oligonucleotides can be modified at the base moiety, sugar moiety, or phosphate backbone, for example, to improve stability of the molecule, hybridization, etc. The oligonucleotides can include other appended groups such as peptides (e.g. for targeting host cell receptors in vivo), or agents facilitating transport across the cell membrane (see, e.g., Letsinger et al., Proc. Natl. Acad. Sci. USA 86:6553-6556 (1989); Lemaitre et al., Proc. Natl. Acad Sci. USA 84:648-652 (1987); PCT International Publication No. WO 88/09810) or the blood-brain barrier (see, e.g., PCT International Publication No. WO 89/10134), or hybridization-triggered cleavage agents (see, e.g., Krol et al., BioTechniques 6:958-976 (1988)) or intercalating agents. (See, e.g., Zon, Pharm. Res. 5:539-549 (1988)). To this end, the oligonucleotide may be conjugated to another molecule (e.g., a peptide, hybridization triggered cross-linking agent, transport agent, hybridization-triggered cleavage agent).

[0203] The antisense molecules are delivered to cells that express SLIT-3 in vivo. A number of methods can be used for delivering antisense DNA or RNA to cells; e.g., antisense molecules can be injected directly into the tissue site, or modified antisense molecules, designed to target the desired cells (e.g., antisense linked to peptides or antibodies that specifically bind receptors or antigens expressed on the target cell surface) can be administered systematically. Alternatively, in a preferred embodiment, a recombinant DNA construct is utilized in which the antisense oligonucleotide is placed under the control of a strong promoter (e.g. pol III or pol II). The use of such a construct to transfect target cells in the patient results in the transcription of sufficient amounts of single stranded RNAs that will form complementary base pairs with the endogenous SLIT-3 transcripts and thereby prevent translation of the SLIT-3 mRNA. For example, a vector can be introduced in vivo such that it is taken up by a cell and directs the transcription of an antisense RNA. Such a vector can remain episomal or become chromosomally integrated, as long as it can be transcribed to produce the desired antisense RNA. Such vectors can be constructed by recombinant DNA technology methods standard in the art and described above. For example, a plasmid, cosmid, YAC or viral vector can be used to prepare the recombinant DNA construct that can be introduced directly into the tissue site. Alternatively, viral vectors can be used which selectively infect the desired tissue, in which case administration may be accomplished by another route (e.g., systemically).

[0204] Endogenous SLIT-3 or Robo family polypeptide expression can also be reduced by inactivating or “knocking out” the gene, nucleic acid or its promoter using targeted homologous recombination (e.g., see Smithies et al., Nature 317:230-234 (1985); Thomas & Capecchi, Cell 51:503-512 (1987); Thompson et al., Cell 5:313-321 (1989)). For example, an altered, non-functional gene or nucleic acid (or a completely unrelated DNA sequence) flanked by DNA homologous to the endogenous gene or nucleic acid (either the coding regions or regulatory regions of the nucleic acid) can be used, with or without a selectable marker and/or a negative selectable marker, to transfect cells that express the gene or nucleic acid in vivo. Insertion of the DNA construct, via targeted homologous recombination, results in inactivation of the gene or nucleic acid. The recombinant DNA constructs can be directly administered or targeted to the required site in vivo using appropriate vectors, as described above.

[0205] Alternatively, expression of non-altered genes or nucleic acids can be increased using a similar method: targeted homologous recombination can be used to insert a DNA construct comprising a non-altered functional gene or nucleic acid, e.g., a nucleic acid having one of the sequences shown in FIG. 10, or the complement thereof, or a portion thereof, in place of an altered SLIT-3 in the cell, as described above. In another embodiment, targeted homologous recombination can be used to insert a DNA construct comprising a nucleic acid that encodes a Type II diabetes polypeptide variant that differs from that present in the cell. Alternatively, endogenous SLIT-3 or Robo family nucleic acid expression can be reduced by targeting deoxyribonucleotide sequences complementary to the regulatory region of a SLIT-3 or Robo family nucleic acid (i.e., the SLIT-3 promoter and/or enhancers) to form triple helical structures that prevent transcription of the SLIT-3 or Robo Family nucleic acid in target cells in the body. (See generally, Helene, C., Anticancer Drug Des., 6(6):569-84 (1991); Helene, C. et al., Ann. N. Y. Acad. Sci. 660:27-36 (1992); and Maher, L. J., Bioassays 14(12):807-15 (1992)). Likewise, the antisense constructs described herein, by antagonizing the normal biological activity of one of the SLIT-3 or Robo family proteins, can be used in the manipulation of tissue, e.g., tissue differentiation, both in vivo and for ex vivo tissue cultures. Furthermore, the anti-sense techniques (e.g., microinjection of antisense molecules, or transfection with plasmids whose transcripts are anti-sense with regard to a Type II diabetes gene mRNA or gene sequence) can be used to investigate the role of one or SLIT-3 or Robo family members or the interaction of SLIT-3 and Robo family members in developmental events, as well as the normal cellular function of the SLIT-3s or Robo family members the interaction of SLIT-3 and Robo family members in adult tissue. Such techniques can be utilized in cell culture, but can also be used in the creation of transgenic animals.

[0206] In yet another embodiment of the invention, other Type II diabetes therapeutic agents as described herein can also be used in the treatment or prevention of a susceptibility to a disease or condition associated with a Type II diabetes gene. The therapeutic agents can be delivered in a composition, as described above, or by themselves. They can be administered systemically, or can be targeted to a particular tissue. The therapeutic agents can be produced by a variety of means, including chemical synthesis; recombinant production; it vivo production (e.g., a transgenic animal, such as U.S. Pat. No. 4,873,316 to Meade et al.), for example, and can be isolated using standard means such as those described herein.

[0207] A combination of any of the above methods of treatment (e.g., administration of non-altered polypeptide in conjunction with antisense therapy targeting altered mRNA or SLIT-3 or a member of the Robo family; administration of a first splicing variant encoded by a SLIT-3 or a member of the Robo family in conjunction with antisense therapy targeting a second splicing encoded by a SLIT-3 or a member of the Robo family) can also be used.

Monitoring Progress of Treatment

[0208] The current invention also pertains to methods of monitoring the effectiveness of treatment on the regulation of expression (e.g., relative or absolute expression) of SLIT3 or an isoform of SLIT3 at the RNA or protein level or its enzymatic activity. SLIT3 message or protein or enzymatic activity can be measured in a sample of peripheral blood or cells derived therefrom. An assessment of the levels of expression or activity can be made before and during treatment with SLIT3 therapeutic agents.

[0209] For example, in one embodiment of the invention, an individual who is a member of the target population can be assessed for response to treatment with a SLIT3 inhibitor, by examining, for example, absolute and/or relative levels of SLIT3 protein or mRNA, or isoforms thereof, in peripheral blood in general or specific cell subfractions or combination of cell subfractions. In addition, variation such as haplotypes or mutations within or near (within 100 to 200 kb) of the SLIT3 gene may be used to identify individuals who are at higher risk for Type II diabetes to increase the power and efficiency of clinical trials for pharmaceutical agents to prevent or treat Type II diabetes. The haplotypes and other variations may be used to exclude or fractionate patients in a clinical trial who are likely to have non-SLIT3 involvement in their Type II diabetes risk in order to enrich patients who have other genes or pathways involved and boost the power and sensitivity of the clinical trial. Such variation may be used as a pharmacogenomic test to guide selection of pharmaceutical agents for individuals.

[0210] Described herein is the first known linkage study of Type II diabetes showing a connection to chromosome 5q35. Based on the linkage studies conducted, a direct relationship between Type II diabetes and the locus on chromosome 5q35, in particular the SLIT3 gene, has been discovered.

[0211] The present invention is now illustrated by the following Exemplification, which is not intended to be limiting in any way.

Exemplification

[0212] A study was done in collaboration with the Icelandic Heart Association, who provided an encrypted list of 1350 diabetic patients. In 1967-1991 the Heart Association started a study of cardiovascular disease and its complications. Measurements of blood sugar were included in a thorough check-up of the participants, which led to many individuals being diagnosed with diabetes. The list of participants is an unbiased sample of about a third of the Icelandic population. Individuals diagnosed in the years following 1991 were either diagnosed at the Icelandic Heart Association or at one of two major hospitals in Reykjavík Iceland.

[0213] All participants in the Type II diabetes study visited the Icelandic Heart Association where each answered a questionnaire, had blood drawn, a blood sugar assessment, and had measurements taken. Height (m) and weight (kg) were measured to calculate the body mass index. In serum, the fasting blood glucose and triglyceride levels were measured as well. Diagnoses of Type II diabetes were based on the diagnostic criteria set by the World Health Organization (1999). All patients with fasting glucose above 7 mM were diagnosed as having Type II diabetes and individuals with fasting blood sugar between 6.1-6.9 mM were diagnosed with impaired fasting glucose. If the participants had no prior history of diabetes, they were requested to come in for another test to have their diagnosis confirmed. All individuals on diabetic medication were classified as Type II. The questionnaire included questions regarding age at diagnosis and type of medication. All patients were requested to bring two relatives whose DNA was used to confirm the gen-otypes of the patients.

[0214] Since the patients had participated in a study that was conducted between 1967-1991, a considerable time had passed in some instances since they had visited the Heart Association. Therefore, all the patients were required to have another fasting blood glucose test to check on their blood sugar level at the time of participation in the study. Thus, all patients were labeled unconfirmed, meaning that results of blood glucose levels were pending, for this particular study. A label of confirmed diabetics was given to the patient when the measurements were received. Linkage analyses were done with confirmed patients and unconfirmed patients were included only if they were close relatives of a confirmed index patient. The initial list of patients included 1350 Type II diabetics, but during this study, new patients were diagnosed who were relatives of the index patients. All participants with no previous history of diabetes but with elevated fasting glucose were diagnosed according to the WHO criteria as described above. At the present date, 1406 Type II diabetics and 266 patients with impaired fasting glucose have participated in the study, together with 3972 of their close relatives. This study was approved by the Data Protection Commission of Iceland and the National Bioethics Committee of Iceland. All patients and their relatives who participated in the Study gave informed consents.

Outline of the Study

[0215] This particular genetic study aimed at identifying a genetic variant or a gene that contributes to type II diabetes by using a positional cloning approach. Three steps were performed:
[0216] (i) Genome-wide linkage study, where excess allele sharing among related type II diabetics was used to identify a chromosomal segment, typically 2-8 Megabases long, that may harbor a disease susceptibility gene/genes.
[0217] (ii) Locus-wide association study, where a high-density of microsatellite markers was typed in a large patient and control cohort. By comparing the frequencies of individual alleles or haplotypes between the two cohorts, the location of the putative disease gene/genes was narrowed down to a few hundred kilobases.
[0218] (iii) Candidate gene assessment, where additional microsatellites and/or SNPs were typed in all genes that are identified within the smaller candidate region and further association analysis was used to identify which of the genes shows strong association to the disease.
   Linkage Analysis
   Pedigree Construction

[0219] For the linkage analysis, blood samples were obtained from 964 Type II diabetics and 203 individuals with impaired fasting glucose. The patients were clustered into families such that each patient is related to (within and including six meiotic events) at least one other patient. In this manner, 772 patients fell into families—705 Type II diabetics and 67 with impaired fasting glucose. The confirmed Type II patients were treated as probands and clustered into families that each proband is related to, within and including six meiotic events. The other patients, unconfirmed Type II and IFG patients, were added to the families if they were related to a proband within and including three meiotic events. The rational behind this was to include as many patients as possible in the study. Impaired fasting glucose is an immediate diagnosis, and it was assumed that the more closely related these patients are to the confirmed diabetics, the likelier they are to have or to develop, the disease.

[0220] The families were checked for relationship errors by comparing the identity-by state (IBS) distribution for the set of 906 markers, for each pair of related and genotyped individuals, to a reference distribution corresponding to the particular degree of relatedness. The reference distributions were constructed from a large subset of the Icelandic population. Individuals were excluded from the study if their relationship with the rest of the family was inconsistent with the relationship specified in the geneology database.

[0221] The remaining material that was available for the study was the following: 763 now confirmed Type II patients in 227 families together with 764 genotyped relatives. Of the patients, 667 were confirmed Type II patients, 35 unconfirmed Type II patients, 52 confirmed patients with impaired fasting glucose (IFG) and 9 unconfirmed patients with IFG.

Stratification of the Patient Material

[0222] The patients were classified into two sub-phenotypes based on their BMI: non-obese Type II diabetics are patients who have BMI less than 30, and obese Type II diabetics are patients who have BMI at or above 30. The reason for fractionating the diabetics into non-obese and obese groups is that other factors may be influencing the pathogenesis of disease in these two groups. Obesity alone could be contributing to the diabetic phenotype. Therefore, this factor was separated. Obesity is most likely due to a combination of environmental and genetic factors. This fractionation into non-obese and obese diabetics practically separates the material into two halves; 60% of the patients are in the non-obese category (20% with BMI below 25 (lean) and 40% with BMI between 25-30 (overweight)), and 40% of the patients are in the obese category (BMI above 30).

[0223] An affected-only linkage analysis for each of those sub-phenotypes was performed, using the same set of families as above, but classifying patients not belonging to the particular sub-group as having an unknown disease status. Restricted to a particular sub-phenotype, some families no longer contained a pair of related patients classified as affecteds and hence did not contribute in the linkage analysis. Such families were excluded from the analysis of the particular sub-phenotype. The number of patients and families used in the linkage analysis is summarized in Table 1 below.

Genome Wide Scan

[0224] A genome wide scan was performed on 772 patients and their relatives. Nine patients were excluded due to inheritance errors so the linkage analysis was performed with 763 patients and 764 relatives. The procedure was as described in Gretarsdóttir, et al., Am J Hum Genet., 70(3):593-603 (2002). In short, the DNA was genotyped with a framework marker set of 906 microsatellite markers with an average resolution of 4 cM. Alleles were called automatically with the TrueAllele program (Cybergenetics, Co., Pittsburgh, Pa.), and the program DecodeGT (deCODE genetics, ehf., Iceland), was used to fractionate according to quality and edit the called genotypes (Palsson, B., et al., Genome Res., 9(10):1002-1012 (1999)). The population allele frequencies for the markers were constructed from a cohort of more than 30,000 Icelanders that have participated in genome-wide studies of various disease projects at deCODE genetics. Additional markers were genotyped within the locus on chromosome 5q, where we observed the strongest linkage signal, to increase the information on identity by descent (IBD) sharing within the families. For those markers, at least 180 Icelandic controls were genotyped to derive the population allele frequencies.

[0225] The additional microsatellite markers that were genotyped within the locus were either publicly available or designed at deCODE genetics—those markers are indicated with a DG designation. Repeats within the DNA sequence were identified and allowed the selection or or of design primers that were evenly spaced across the locus. The identification of the repeats and location with respect to other markers utilized the physical mapping team at deCODE genetics.

[0226] For the markers used in the genomewide scan, the genetic positions were taken from the recently published high-resolution genetic map (HRGM), constructed at deCODE genetics (Kong A., et al., Nat Genet., 31: 241-247 (2002)). The genetic position of the additional markers were either taken from the HRGM, when available, or by applying the same genetic mapping methods as were used in constructing the HRGM map to the family material genotyped for this particular linkage study.

Statistical Methods for Linkage Analysis

[0227] The linkage analysis was done using the software Allegro (Gudbjartsson et al., Nat. Genet. 25:12-3, (2000)), that determines the statistical significance of excess sharing among related patients by applying non-parametric affected-only allele-sharing methods (without any particular disease inheritance model being specified). Allegro, a linkage program developed at deCODE genetics, calculates LOD scores based on multipoint calculations. The baseline linkage analysis used the Sₚₐᵢᵣₛ scoring function (Whittemore, A. S. and Halpern, J., Biometrics 50:118-27 (1994); Kruglyak L, et al., Am J Hum Genet 58:1347-63, (1996)), the exponential allele-sharing model (Kong, A. and Cox, N. J., Am. J. Hum. Genet., 61:1179 (1997)), and a family weighting scheme which was halfway on a log scale between weighting each affected pair equally and weighting each family equally. In the analysis, all genotyped individuals who were not affected were treated as “unknown”. Because of concern with small sample behavior, corresponding P-values were usually computed in two different ways for comparison. The first P-value was computed based on large sample theory; Z_{Ir}=√(2 logₑ (10) LOD) and was approximately distributed as a standard normal distribution under the null hypothesis of no linkage. A second P-value was computed by comparing the observed LOD score to its complete data sampling distribution under the null hypothesis. When a data set consisted of more than a handful of families, these two P-values tended to be very similar.

[0228] All suggestive loci with LOD scores greater than 2 were followed up with some extra markers to increase the information on the IBD-sharing within the families and to decrease the chance that a LOD score represents a false-positive linkage. The information measure used was defined by Nicolae (D. L. Nicolae, Thesis, University of Chicago (1999)) and is a part of the Allegro program output. This measure is closely related to a classical measure of information as previously described by Dempster et al. (Dempster, A. P., et al., J. R. Statist. Soc. B. 39:1 (1977))—the information equals zero if the marker genotypes are completely uninformative and equals one if the genotypes determine the exact amount of allele sharing by descent among the affected relatives. Using the framework marker set with average marker spacing of 4 cM typically resulted in information content of about 0.7 in the families used in the linkage analysis. Increasing the marker density to one marker every centimorgan usually increased the information content above 0.85.

Results

[0229] The results of the genome-wide linkage analysis with the framework marker set are shown in FIG. 2, which depicts the allele-sharing LOD-score versus the genetic distance from the p-terminus in centimorgan (cM) for each of the 23 chromosomes. The analysis was performed with the three phenotypes: all Type II diabetics (solid lines), non-obese diabetics (dashed lines) and obese diabetics (dotted lines). A LOD-score of 1.84 was observed on chromosome 5q34-q35.2 with the framework marker set when all Type II diabetics were used in the analysis. When the linkage analysis was restricted to non-obese diabetics, this LOD-score increases to 2.81. The obese diabetics did not show linkage in this region.

[0230] Additional markers were genotyped in this area to increase the information content and to confirm the linkage. The information on the IBD-sharing at this locus was about 78% with the framework marker set. In order to increase the information content, another 38 microsatellite markers were genotyped within a 40 cM region that includes the observed signal. Repeating the linkage analysis including the additional markers increased the LOD-score to 3.64 (P-value=3.18×10⁻⁵) for the non-obese diabetics. For all patients, the peak LOD-score increased to 2.9 (P-value=1.22×10⁻⁴). This is shown in FIG. 3.

[0231] The peak of the LOD-score is centered on marker D5S625 and the region determined by a drop of one in the LOD is from marker DG5S5 to marker D5S429, centromeric and telomeric respectively. The one-LOD-drop is about 9 cM and estimated to be about 3.5 Mb. This 1-LOD-drop roughly corresponds to the 80-90% confidence interval for the location of a putative disease associated gene.

Locus-Wide Association Study

Genotyping to Narrow Down the Region of Linkage

[0232] In order to narrow down the region of interest, the linkage analysis was followed by a comprehensive association study of the 1-LOD-drop. This was performed because the linkage analysis has limited resolution in that it compares sharing among closely related individuals that share, on average, large chromosomal segments. For the association analysis, identified a large number of additional microsatellite markers were identified as located in the 1-LOD-drop, and those markers were typed in both the patient cohort and in a large number of unrelated controls randomly selected from the Icelandic population.

[0233] Sixty-seven markers were identified and typed in the 1-LOD-drop, in addition to the 17 markers already typed and used in the linkage analysis. The locus-wide association microsatellites are as shown in FIG. 7. The new polymorphic repeats (dinucleotide or trinucleotide repeats) were identified with the Sputnik program. The smaller allele of CEPH sample 1347-02 (CEPH genomics repository) was subtracted from the alleles of the microsatellites and used as a reference. Thus, a total of 84 markers were available for the association analysis, i.e., an average density of one marker every 42 kb or one marker every 0.107 cM. All those markers were typed for 590 non-obese diabetics and 477 unrelated controls.

Statistical Methods for Association and Haplotype Analysis

[0234] For single marker association to the disease, the Fisher exact test was used to calculate a two-sided P-value for each individual allele. When presenting the results, allelic frequencies were used rather than carrier frequencies for microsatellites, SNPs and haplotypes. Haplotype analyses were performed using a computer program developed at deCODE called NEMO (NEsted MOdels) (Gretarsdóttir, et al., Nat Genet. October;35(2):131-8 (2003)). NEMO was used both to study marker-marker association and to calculate linkage disequilibrium (LD) between markers, and for case-control haplotype analysis. With NEMO, haplotype frequencies were estimated by maximium likelihood and the differences between patients and controls were tested using a generalized likelihood ratio test. The maximum likelihood estimates, likelihood ratios and P-values were computed with the aid of the EM-algorithm directly for the observed data, and hence the loss of information due to the uncertainty with phase and missing genotypes was automatically captured by the likelihood ratios, and under most situations, large sample theory could be used to reliably determine statistical significance. The relative risk (RR) of an allele or a haplotype, i.e., the risk of all allele compared to all other alleles of the same marker, was calculated assuming the multiplicative model (Terwilliger, J. D. & Ott, J. A haplotype-based ‘haplotype relative risk’ approach to detecting allelic associations. Hum Hered 42, 337-46 (1992) and Falk, C. T. & Rubinstein, P. Haplotype relative risks: an easy reliable way to construct a proper control sample for risk calculations. Ann Hum Genet 51 (Pt 3), 227-33 (1987)), together with the population attributable risk (PAR).

[0235] In the haplotype analysis, it may be useful to group haplotypes together and test the group as a whole for association to the disease. This is possible to do with NEMO. A model is defined by a partition of the set of all possible haplotypes, where haplotypes in the same group are assumed to confer the same risk while haplotypes in different groups can confer different risks. A null hypothesis and an alternative hypothesis are said to be nested when the latter corresponds to a finer partition than the former. NEMO provides complete flexibility in the partition of the haplotype space. In this way, it is possible to test multiple haplotypes jointly for association and to test if different at-risk haplotypes confer different risk.

[0236] As a measure of LD, two standard definitions of LD, D′ and R² were used as they provide complementary information on the amount of LD (Lewontin, R. “The interaction of selection and linkage I. General considerations: Heterotic models.” Genetics, 1964. 49:49-67; Hill, W. G. and A. Robertson, “Linkage disequilibrium in finite populations.” Theor. Appl. Genet., 1968. 22:226-231). For the purpose of estimating D′ and R², the frequencies of all two-marker allele combinations were estimated using maximum likelihood methods and the deviation from linkage disequilibrium was evaluated using a likelihood ratio test. The standard definitions of D′ and R² were extended to include microsatellites by averaging over the values for all possible allele combinations of the two markers weighted by the marginal allele probabilities.

[0237] The number of possible haplotypes that could be constructed out of the dense set of markers genotyped in the 1-LOD-drop was very large, and even though the number of haplotypes that were actually observed in the patient and control cohort was much smaller, testing all those haplotypes for association to the disease was a formidable task. Note that the analysis was not restricted to haplotypes constructed from a set of consecutive markers, as some markers might be very mutable and might split up an otherwise well conserved haplotype constructed out of surrounding markers.

[0238] The approach taken to the problem of identifying those haplotypes in the candidate region that show strongest association to the disease was two-fold: First, the haplotypes tested were restricted to span a sub-region small enough that the included markers may be expected to be in substantial LD. In this study, only haplotypes that span less than 300 kb were considered. Second, an iterative procedure was applied, that gradually builds up the most significant haplotypes. Starting with haplotypes constructed out of 3 markers, those haplotypes that showed strong association to the disease were selected, other nearby markers were added to those haplotypes, and the association test was repeated. By iterating this procedure, those haplotypes that show strongest association to the disease were identified.

Results

[0239] For the association analysis, 590 non-obese Icelandic Type II diabetes patients and 477 unrelated population controls were genotyped using a total of 84 microsatellite markers. These markers were distributed evenly across a region of approximately 3.5 Mb. The region was centered on the linkage peak and corresponded to the 1-LOD-drop. The procedure described above was then followed, and single-markers and haplotypes consisting of up to 5 markers that showed association to the disease were identified. The result is summarized in FIG. 4. In FIG. 4, the location of a marker or a haplotype is shown on the horizontal axis and the corresponding P-value from the associaton test on the vertical axis. This is shown for all haplotypes tested that have a P-value less than 0.01. The horizontal bars indicated the size of the corresponding haplotypes and the location of all markers is shown at the bottom of the figure. All locations are in Mb and refer to the NCBI Build33.

[0240] A series of correlated haplotypes were observed that show strong association for non-obese diabetics in two locations within the 1-LOD-drop. Those regions were denoted A (168.37-168.83 Mb) and B (169.70-170.17 Mb), and in Table 2 are listed the most significant haplotype in each of those regions. For each haplotype, the table includes a two-sided single-test P-value for association, calculated using NEMO, the corresponding relative risk, the estimated frequency of the haplotype in the patient and the control cohorts, the region the haplotpe spans, and the markers and alleles (in bold) that define the haplotype. Note, however, that some of the haplotypes listed within each of the two regions are very correlated and should be considered as a single observation of association to the disease. This is demonstrated for region A in Table 3, which lists the pairwise correlation, both D′ and R², between the haplotypes. Based on the correlation, we can split the A-haplotypes into two groups; group I includes A1, A4 and A6, and group II includes A2, A3 and A5. Haplotypes within each of the groups are very correlated, however, there is much less correlation between haplotypes in different groups. From Table 2 it is observed that group I can be defined by haplotype A6 alone as both haplotypes A1 and A4 are a subset of A6. Likewise, group II can be defined by A2 alone. As the correlation between A2 and A6 is weak, they constitute almost independent observations of association to non-obese diabetes in region A. Hence it is possible to test haplotypes A2 and A6 together as a group for association to non-obese diabetes. This test yields a P-value=2.9×10⁻⁹ with a corresponding relative risk of 4.2, a population atributable risk of 11.5%, and an allelic frequency of 0.078 and 0.020 in the patient and the control cohorts, respectively.

Investigation of Region A

Genes in Region A

[0241] All genes in and around region A were identified (UCSC (University of California at Santa Cruz (http://www.cbse.ucsc.edu/Genome/; this is a human reference sequence based on NCBI Build 33, produced by the International Human Genome Sequencing Consortium). In the region defined by the six most significant haplotypes, 168.37-168.83 Mb, there is only one gene, SLIT3 (slit homolog 3 (Drosophila)). SLIT3 is a rather big gene that extends over 600 kb, from 168.03 to 168.66 Mb, and the at-risk haplotypes are localized in the 5′-end of the gene and include the first four exons. This is shown in FIG. 5, which shows the location of all microsatellites in the interval 167.6 to 169 Mb (filled circles), the locations of all the exons of SLIT3 (filled boxes) and the span of the at-risk haplotypes A1, . . . , A6 (grey horizontal bars). The figure also shows the location of four neighbouring genes ODZ2 (odd Oz/ten-m homolog 2), KIAA0869, RARS (arginyl-tRNA synthetase) and PANK3 (pantothenate kinase 3) (shaded boxes) that are located centromeric to SLIT3, i.e. 500 kb away from the observed association signal. Exons of SLIT3 are also shown in FIG. 8, which depicts the Build33 location of the exons.

Identification of SNPs and Microsatellites

[0242] In order to identify SNPs across SLIT3, all 36 exons of SLIT3 and their flanking regions were sequenced on 94 non-obese diabetic patients. As a consequence, 68 SNPs were identified, and are shown in FIG. 9 (depicting the Build33 location of SNPs found across SLIT3 after sequencing of the exons and flanking sequences). They include four non-synonymous amino acid changes—SLT_{—}683623 (P to R), SLT_{—}673223 (Y to F), SLT_{—}596643 (Q to R) and SLT_{—}585043 (V to A). Two SNPs, SLT_{—}596643 and SLT_{—}585043, are SNPs that have been previously reported in the public domain as rs2288792 and rs891921, respectively. Additional SNPs were identified across the gene by selecting SNPs from the public domain (US National Center for Biotechnology Information's SNP database) and designing SNP assays for them. SNPs SG05S458 and SG05S459 were identified from spot sequencing the 5′ end of SLIT3 on 12 population-based DNA samples. See FIG. 10 for the DNA sequences of the SNPs identified across SLIT3; and FIG. 11 for the Build33 location of all SNPs and microsatellites identified as polymorphic across SLIT3.

[0243] SNPs on 470 non-obese diabetics and 658 population-based controls were genotyped using a method for detecting SNPs with fluorescent polarization template-directed dye-terminator incorporation (SNP-FP-TDI assay) (Chen, X., Zehnbauer, B., Gnirke, A. & Kwok, P. Y. Fluorescence energy transfer detection as a homogeneous DNA diagnostic method. Proc. Natl. Acad. Sci. USA 94, 10756-10761 (1997)).

Association Study of SLIT3

[0244] Twenty-nine microsatellite markers and 77 SNPs, located in and around SLIT3, were tested for single-marker association to non-obese diabetics. FIG. 12 shows the DNA sequences of the microsatellites employed for the association studies across SLIT3 (including Build33 locatrions); FIG. 13 shows the names of the SNPs and microsatellites employed for the association analysis across SLIT3. For this part of the association study, 523 non-obese diabetics and 323 unrelated population controls that had been typed for both the microsatellites and the SNPs were used. Thirteen markers had different allelic frequencies between patients and controls with a P-value less than 0.05. Those results are listed in Table 4. FIG. 6 shows the results of the single-marker association (FIG. 6c), together with the exonic structure of SLIT3 (FIG. 6a) and the location of the 106 microsatellites and SNPs (FIG. 6b).

[0245] Five of the 13 markers that show association were located in the 5′ end of SLIT3, close to, and downstream of, the first exon. The haplotype analysis was repeated, restricted to the 106 microsatellites and SNPs in SLIT3 and, as for the locus-wide association, only haplotypes shorter than 300 kb that included five or less, possibly non-consecutive, markers, were tested. Table 5 shows the five haplotypes that showed strongest association to non-obese diabetes, with P-values ranging from 2.3×10⁻⁸ to 6.9×10⁻⁸. Like the most significant haplotypes observed in the locus-wide association, these five haplotypes, which are strongly correlated to each other, span the first four exons in the 5′ end of SLIT3. The span of haplotype C1 is shown at the bottom of FIG. 6. Indeed, the key SNPs in defining those haplotypes are located very close to the first exon. The four most significant haplotypes, C1-C4, are very common, with allelic frequency of 0.28 in patients and 0.16 in controls, with relative risk 2.1 and population attribuatble risk of 27.5%.

[0246] Although haplotypes C1, . . . , C5 are localized in the same region as the most significant microsatellite haplotypes observed in the locus-wide association study, they constitute an independent observation of association to non-obese diabetes of the 5′-end of SLIT3. For example, the correlation coffecient R² between haplotype C1 and haplotypes A2 and A6 is 0 and 0.02 respectivly. Again, just as with A2 and A6, haplotypes C1, A2 and A6 can be tested together as a group for association to non-obese diabetes. This test yields a P-value=6.3×10⁻¹¹ and corresponding relative risk and population atributable risk of the haplotypes as a group is 2.2 and 33%. The frequency of the haplotype group is 0.33 in non-obese diabetics and 0.18 in the control cohort.

Association Study of Other Genes in the Region

[0247] In order to verify if any of the neighboring genes showed any association to diabetes, the exons of ODZ2, KIAA0869, RARS and PANK3 were sequenced, and the SNPs that were found were typed, together with a number of microsatellite marker and public SNPs, in the same cohort of non-obese diabetics and population controls. No association was observed across any of these genes.

[0248] Tables

TABLE 1
The number of patients and families that contribute to
the genome-wide linkage scan, both when all the patients
are used, and when the analysis is restricted to obese
or non-obese diabetic patients respectively.

| | | No. of families | No. of patients |
|---|---|---|---|
| | Total Number | contributing to | contributing to |
| Phenotype | of Patients | the analysis | the analysis |
| All diabetics | 763 | 227 | 763 |
| Obese | 296 | 92 | 219 |
| Non-obese | 467 | 154 | 413 |

[0249] TABLE 2
Haplotypes within the 1-LOD-drop that show the strongest association to non-obese diabetes. For each haplotype, we
show (i) a two-sided P-value for a single test of association to non-obese diabetes, (ii) the corresponding relative
risk (RR), (iii) the estimated allelic frequency of the haplotype in the patient and the control cohort, (iv) the span
of the haplotype (refering to NCBI33) and (v) the alleles (in bold) and markers that define the haplotype. The haplotypes
are separated into two groups, A and B, corresponding to two different regions within the 1-LOD-drop.

| | | P-value | RR | Aff. frq | Ctrl. frq | Span (Mb) | Haplotype |
|---|---|---|---|---|---|---|---|
| Region A | A1 | 0.000005 | >10 | 0.033 | 0.000 | 168.37-168.72 | 0 DG5S879 4 DG5S881 −4 C5S2075 0 DG5S883 4 DG5S38 |
| | A2 | 0.000006 | 3.81 | 0.053 | 0.015 | 168.55-168.77 | 4 DG5S1058 −6 DG5S37 |
| | A3 | 0.000008 | 3.64 | 0.054 | 0.015 | 168.55-168.83 | 4 DG5S1058 −6 DG5S37 0 DG5S101 |
| | A4 | 0.000015 | 6.18 | 0.046 | 0.008 | 168.40-168.72 | 4 DG5S881 4 DG5S1068 −4 DGS2075 0 DG5S883 4 DG5S38 |
| | A5 | 0.000015 | 4.42 | 0.047 | 0.011 | 168.37-168.77 | 0 DG5S879 4 DG5S1058 −6 DG5S37 |
| | A6 | 0.000018 | 6.94 | 0.045 | 0.007 | 168.40-168.72 | 4 DG5S881 −4 D5S2075 0 DG5S383 4 DG5S38 |
| Region B | B1 | 0.000011 | >10 | 0.039 | 0.000 | 169.87-170.17 | 0 DG5S953 0 DG5S955 0 DG5S13 5 DG5S959 |
| | B2 | 0.000023 | >10 | 0.034 | 0.000 | 169.65-169.87 | 27 DG5S888 0 DG5S953 |
| | B3 | 0.000023 | 5.26 | 0.049 | 0.010 | 169.87-170.04 | 0 DG5S953 0 DG5S955 4 DG5S124 |
| | B4 | 0.000031 | >10 | 0.034 | 0.000 | 169.65-169.87 | 27 DG5S888 0 DG5S44 0 DG5S953 |
| | B5 | 0.000060 | >10 | 0.034 | 0.000 | 169.87-170.17 | 0 DG5S953 0 DG5S955 0 DG5S13 0 DG5S123 6 DG5S959 |

[0250] TABLE 3
Pairwise correlation between the six haplotypes in the A-region
that show the strongest association to non-obese diabetes.
Estimates of D′ are shown in the upper right corner, and
estimates of R² are shown the the lower left corner. The haplotypes
are labelled A1, . . . , A6 as in Table 2.

D′

| | | A1 | A2 | A3 | A4 | A5 | A6 |
|---|---|---|---|---|---|---|---|
| R² | A1 | — | 0.72 | 0.85 | 1.00 | 0.72 | 1.00 |
| | A2 | 0.25 | — | 1.00 | 0.36 | 1.00 | 0.41 |
| | A3 | 0.31 | 1.00 | — | 0.35 | 1.00 | 0.41 |
| | A4 | 0.64 | 0.10 | 0.10 | — | 0.36 | 1.00 |
| | A5 | 0.31 | 0.86 | 0.86 | 0.10 | — | 0.44 |
| | A6 | 0.73 | 0.14 | 0.14 | 1.00 | 0.16 | — |

[0251] TABLE 4
The most significant single-marker allelic association results with SLIT3.
All results with a two-sided P-value <0.05 are shown, both for microsatellites
and SNPs. Included in the table is the corresponding relative risk (RR),
the number of non-obese diabetics and controls used in the test and the corresponding
frequency of the at-risk variant in both cohorts.

| Location | Marker | Allele | P-value | RR | #aff | Aff. frq | #ctrl | Ctr. frq |
|---|---|---|---|---|---|---|---|---|
| 168.334817 | DG5S1053 | 24 | 0.007 | 9.61 | 461 | 0.015 | 312 | 0.00 |
| 168.719742 | SG05S451 | C | 0.012 | 2.49 | 518 | 0.045 | 240 | 0.02 |
| 168.770226 | DG5S37 | −6 | 0.013 | 1.94 | 491 | 0.060 | 314 | 0.03 |
| 168.098154 | DG5S1047 | −12 | 0.013 | 1.35 | 468 | 0.277 | 313 | 0.22 |
| 168.666372 | SLT_8778 | A | 0.015 | 1.34 | 502 | 0.778 | 311 | 0.72 |
| 168.112080 | SLT_621478 | T | 0.015 | 1.42 | 476 | 0.563 | 124 | 0.48 |
| 168.051407 | SLT_680684 | C | 0.017 | 1.44 | 504 | 0.302 | 152 | 0.23 |
| 168.677067 | SLT_278 | G | 0.018 | 1.32 | 505 | 0.777 | 317 | 0.73 |
| 168.666183 | SLT_8967 | C | 0.026 | 1.31 | 492 | 0.323 | 267 | 0.27 |
| 167.992779 | DG5S87 | 0 | 0.033 | 1.27 | 434 | 0.460 | 279 | 0.40 |
| 168.334817 | DG5S1053 | 26 | 0.034 | 7.52 | 461 | 0.012 | 312 | 0.00 |
| 168.554788 | DG5S1058 | −2 | 0.038 | 4.35 | 461 | 0.014 | 305 | 0.00 |
| 168.288956 | rs891958 | G | 0.044 | 1.33 | 496 | 0.192 | 311 | 0.15 |

[0252] TABLE 5
Microsatellites and SNP haplotype association within SLIT3. The five haplotypes, that include 5
or less markers and are shorter than 300 kb, that show strongest association to non-obese diabetes.
The five haplotypes, that are strongly correlated, all span the 5′ end of the gene.

| | P-value | RR | Aff. frq | Ctrl. frq | Haplotype |
|---|---|---|---|---|---|
| C1 | 2.334E−08 | 2.12 | 0.286 | 0.159 | 4 DG5S831 G SLT_90256 G SLT_89801 C SLT_8967 G SLT_278 |
| C2 | 4.329E−08 | 2.09 | 0.283 | 0.159 | 4 DG5S881 G SLT_89801 0 DG5S1845 C SLT_8967 G SLT_278 |
| C3 | 4.553E−08 | 2.10 | 0.282 | 0.158 | 4 DG5S881 G SLT_89801 0 DG5S1645 C SLT_8967 T SLT_8778 |
| C4 | 5.503E−08 | 2.07 | 0.286 | 0.162 | 4 DG5S881 G SLT_90256 G SLT_89801 C SLT_8967 T SLT_8778 |
| C5 | 6.927E−08 | 2.25 | 0.244 | 0.125 | 4 DG5S881 T rs297898 G SLT_89801 0 DG5S1645 C SLT_8967 |

[0253] The teachings of all publications cited herein are incorporated herein by reference in their entirety. While this invention has been particularly shown and described with references to preferred embodiments thereof, it will be understood by those skilled in the art that various changes in form and details may be made therein without departing from the scope of the invention encompassed by the appended claims.

The application's sequence listing, which the Patent Office published only in electronic form, follows.

SEQUENCE LISTING (236 sequences)

SEQ ID NO: 1 - DNA, 634888 bp, homo sapiens
gctccccagcccagccccaagccggacctccccgggcgccacgccccattgcgctcgccccaggtccccaacccggcccgcgggccagcggggccagggggcgctccgcacctgggcactcccagcgatgcgcagcggggcagcgccggccccgccgatggagctgctgttgctgccgccgccgccgcccggagcgccccgctccgcccgcgccccgtgcgcctgagcaccgagctcgcccctcctccgcgctaactccgccgcccgctccccaggccgcccgcgctccccgcgcgcctcctcgggctccacgcgtcttgccccgcagaggcagcctcctccaggagcggggccctgcacaccatggcccccgggtgggcaggggtcggcgccgccgtgcgcgcccgcctggcgctggccttggcgctggcgagcgtcctgagtgggcctccagccgtcgcctgccccaccaagtgtacctgctccgctgccagcgtggactgccacgggctgggcctccgcgcggttcctcggggcatcccccgcaacgctgagcgcctgtgagtacccctgccccaccccacgcgggccacccacctgggtcccaccgagggggccccaggcgccagatccgtcctttcccctcggcctccctggatgcagtctctattctcatcccttcctggatacgatccctcactctccgagctgggggtctgtaggcttggtcagatctggaaagagaggtctcgaaacccccagcgatgggcaaagagcagtgcctctccaggggtgagggttccagacgcagggcccgctgacagcttccaaggagtagctgaggagaggcgaggggaggcaagagcactgcagcctcaaggtcttagggtgagggtcaggggtctgcgctcgttaaaaaggggggcgggcgaaggagaaagctataggatgatgggccgtcaaggcgcggaggcgggagagagggcccgagactgttgacctgcttggagatcagaatgggccagccgctctctggctgcccttgcaaggaaagttgagagtgtgggtgaaggtttaacttctgaggaactggacagattcagagtgggtgctcgcaaaacccgctctgcctggagcgcagtctgggagatgccaagttgcagccccgggtgaattttttatggctcggttataaatgcctccccgaacgaaggggccggagaatggaaatgctgacagcccttcaaatgagaccgagcgttataatcttacaaaccgcactcagcctcagatcctgggcttggcagcgaatggagaggcgcttggagaatggggtggattgaccctagttttagccccaattgtgcaaccaaatatttacttttcatatgtcaacgttttggaaacatttatcattttgatcctcggaccagattcaaaacttggactccggggtgggctcctcttagtccgcagttggggtggggtaagggagtgggggagaaacgctggagtgggtgggaagccttactgggaacccagccgagaagtgggtgagggtttgctctagtgtggtagattccctccgtgtcttgctctccctcttctccccttcctcatgtgccttaggggtaggcgcctggatcttccactctgctttcttgacttcaggctggaagagagtagtgatgacaagcattgtcctagagtgtgttattcctgctagtcacctcctatcaccccacctcctcttctcttccacttctttgtgcatctctgggtggagactcagcagaactgtcttccttattcctggtgctctctttttcctttggctcagtacttttttgtttttccacaagtgcagtgattgttttgttgggttgaaccacagaatcctaaagggtgagagccgaatctttattaacacatgtcgaaaaccaggcttggaagtgtaaaatgacttgcccaagaaaacacagcaagttgacggcaataaaggggctagaatccaggttttcacaccttaattcagacattaagttagtccataggagtgaaaaacttgttttagtggtatttttagatacctataacttgtaaactaagttcccctcctcgtcacaccagtgctagccacatgagttagtgaaataataattatagctaatgtttgataaatgcttttcatgccttgatttgtgtatatgtattatctcattgaatcactccaacagtcctgttagttacataggcaatgcttattactccctttcacagttaagccatcttgtcatttactcaaggtcgtgcagctagtgaagtgtttggatccaagcctgactggttcctaagcccacaaccgttatcactctcctggtcatccttggaacaagggtcagtttgggccacgatctataaacagacagtcttgggagggttctggctgggcttggatcttagaataggctgctgttgcttctgcttctggtataccctgcaaatgttcagctcactttgatgttaggtctgctgcttggggtctcgcaactacatcttccgcatcttcaaaatcgtgctccatgtttgggaaaccaagaagagtaagtccctctcctcctggtgtgtaggaagttttccagagctgcaggaaccgcacccatgccagcatgccaccgagtcatcttccttaggggatctgtgcagctcagggcaacccatcagctctagaactggagaaacaggacagagactggagtcctggtcattcccagaggccccctgctgcagtcgttaataggcagtggcagagcaggagcttctttgatgtctctggtctcttctgcctcagttgtggtcactggtgccactttggccagggtgcatgggggtgccgcgatggtatctcattctagtctccttcctccctgggaatgggggacagtctgtaggagcaagctgggtcaggttcactgcagggtttcagggcaacccaccaacagtccttcaccaccaaagtcctgcaccacactctctctcagccaactcaaatgtaacatttcaattctgaaaactcttgggggatatttggcatttttactctctgccaaggatttcttcagaggaatcactcatttattcctgccttcattcattcaacaaacattacttgaagccgggcgcagtggctcatgcctgttatcccagcactttgggaggctgaggtgagaggatcgcttgagcctaggagtttgagaacaaacatgacttgaacctctactgcattccagaaactgtatatagaaccattgcaaatacagaagaaaaccagcacttcaatgtaaagaatgtaagcaaaagatagaaggaaacttgctttggtgagccttttgaacttcccagggttcatgttgccatggggcacgttttgtcagcactgtcatcagatgctcaggaccttcctaaaatccagttttctgatctcaaaggtttaaattgtgttttaaaacaaagaaactgcattttctccgttctccattcttggtactctgcctcccaaaaaggctttgatgaagggatttgtgtgtgtgtgtgtctgtgtatattgcttctctggatgtttttgacttctgaaaccttgtgttatgacattaaggaaaacctgagtggggataatgtgctcaccatttggactttgcttcaggcctggaatggggcctcaattgttcataattaagccagaatcagaattggggggtctgtgttccaagatcttccctataatgtcagaacatcacgcagaaaaagaaactctgtcttttataaactactgacaatttttccccctccatgaggaggtgacacccacaagaaagctaaataaatgcagagaagaattcagtgtaatttattatccgtgcagcaaagatagaggacgagaggagaggaagtggatggcggtgcctgaaaccaaacatttaccatggagcacagagtaaacagatgttgcacttacccttctgactacaaaaggagcccacagatgtaattcttctccaaccacaatctcagcctggaaaaagaggaggcagatgaaaatgaactctcacacggggccacttctccccatcttgccgtccttgtctagaggcaggcagaggcccacttctcactgcagtgaggggtggcctgaacggtggagtgggggcaagagtggacatctttggtttttcacttggctctggaacatgctggagactgctgtatttaaataaacatttcctgtttgcgaaggagaacgggcgaaaggctgaaacgtgagaatgtggtaacttaattttctccatcactccaaatgacggctagctttgccggtggttgggcccaataaaaactgacaccatgtcataggctttccctcacttgaccacagaggtcctgaggtcaagtgagagactttccaagatgctcaacagccaagtcctctgtccagccctcagggccagcttagaggacaggaacaagctagtgaatcatggggtctctctgggtcaaccacggtgatgtggccttttagggaaacacagtgccctcctggacagactaaggagcagctgagtggacccgcctccagtggaccggtatagcctccatggtgctgtgcaactctgaacggattacattacctctctgggcctcattttcatgaaagtagaattcttgtatagtcttagtggttttcttagtggttatagtccactgggggaactgtaagtatccgcctccctagtgtctagaacagtgcctggcacacagtaggtgttcagcagatgtgtatttaataaaggaataatgaacctcaaaactacaagtctgtctttagttcttaaaagtgaaagatgggccattatagatctgcattctggcatatgactaagggatcctcactagtaacctatgacatgagttattaagggtatctaaaatttggattttatgaactaatatttattgccttactagagttaccaaggactcctgttgagtgatctactctggagtctggttgccaggcattgcttagcaaccttgcaaaactcctactgtgcacatgcccatgaaaagaactggaaatcctgagcacttaaaccacagggctttctaatcaggaactcatcagcgtcatcctgagtgctctgtgggttttgattgctgctcttcttgtattaattgataagttctgcttttgttgatcatctggattttctattatttctgcatttttgccgttttgattgttatgttgttttctctccagtattgtttgttgtcacagagttctgtctcacctggaaagtgagaatgaacagtgggttgcagctgtagaacctcttgccttggcaatgtgggctatggcaagaaggttcccgacccctaagcatcgtggttagggcaggcgctccggagacagacgactgtgggtttgaattgcagctctgttacatcttgctgttgcactgtgggcatgttacactattgctgtggactgcagtgtgttaaattctttagtaccttatttccacacctgtgataccaggatgatgagcgcacggtcttcatggggatgctgtgaatgtagcctgaggcagtccctgtaatgtgctcagcacggtgcctaccatgttgttcactcattgctgtgattgtttatccctctatgatttcttaactgtaaaatatgtatgatgactctaccccattggggggattaaacaaaataatatacaggaaagtgcttaacacagtacagtcatgtgttacctaaaatgacattctggtcaacagtggacaacatagaggacggtggtctcataaggttaaaatggagctgaagaattcctatcgcctagtgacatcgtagcttttgtaatgtcatagtgccatcactttatttttaataaatttagtacagcctaagggtatagtgttgacaaagtctacagtagtgtacagtaatgtcctaggccttcacattcactcagcactcactcactgactcacccagagcaacttccagtcctgtaagctttattcctggtaaatgccctgtgcagatgtaccattttttatctttcataccatactttgatggtaccttttctatgtataggtatgttgagaaacacacatacttatgattgtgtcacagtggcttacggtattctgtagaggaacatgctatgcaggtttggagcttaggagcaataggctatcacatctagcctagacgtatagtaggctagaccatctgggctcgtgtgagtgcactctatgaggtttgcacaatgacgaaatcgcctaatggtgagtttcttagaacgtatccccatcattaagtgatgcatgaccccaccataggagccctccctgaactattcatgttagtggccatggctattacctttatatcttcatctcaggccctatccagctggaaggtttgagacgcccatcctaaacttgctccaacccagagccctgtggaagcgacttccttgcctgcctgtgggctatgcccaataccctcttggctaggcccctccttttctctctctgctcttggtcctgcccccacagcagagcccaggttggcttctgttccataaaaagggaattgtggtgaaagtggtttatatcttttccatgggtgtgttgctttgtggtatatttaaataaggaatgcattttatttatttatttttggggggtgggttttcatggggaatttttggccctgactttttttttttttttcaatgctcattccttctatttttccttaaatacctccttttactgacttcccatgtctgcctctattactgtgtttacttgaaacagctgtatttcctagcaggctccaccctcattatgtaaggtggtcttaaccctttttaggactgctgaaaagaaaggaaaaacaaggggtggaggcattcccagagagctcatctggaccactgctgatcacaagctagatggctgtagagggtgccctggcactgtgctgagctccccgtgctctccgttcttcattgttctccatccttgaattcaaatcagccttgccaaggttggatgctcatgttgggaatcctctacctctctgctctgcaggcctggacggtgatctgtaactactgtgactgctggcctgtcaagaggctaacctttcttccccactcactgtggtcttcatagttgtgttgtcagtaccatgtttgatacagtgaaaccctggaaaaaaattggccaaagcgtgcatgattagagccttctgtactgcgtggacagagaagataggaaaatgtggcactagagccagactctggggcccaaagcccggttctgtcacctactagctggatgggcctcagttttcccatttgcaaaatgggaataataataatactcccttcaaaggatgctgtattaatccacataggctgcctggaaccaagggcaccctccatcaatattcctattgttattatggtcaaaagtcttactgagtgtagacctcctatcagagcatgatcaggatgaagcttcattaagaaaaatacagatcgtcagcgttggaagaggtccatttgtccaagttccaaccacacgaaggttggtcttccatcagcatgatttaggggaaggtggtcagttagcctcctttgcttgatgatatctagtgatgaggagctcagttcttcctaaagcaatttattccattaaaaaaaccacaatcctaataagaaaatgttctttgtgtggggattggacttatctctcattgattgttgtaacccagagcatgtataatcttttttccaaatgacaggttttcaaaagtcttattgctgtggtgtttctcaccacccatttaccggagtctccttaattgcctcaactattctgtatgtggtacagtttgggcataggcctcgtactccatccatagttctcttcctctaaataggttccaatcttcttggactgtattagttagaaggagaccttccatgccttcactgttttatttgacttctatcagccagcgcattcaaaagaaccttttcactttggacagccacagccctgggtaggctcattttgaccaagctgcctgacatccccatatctccccagtcttccctgctgttagcttgttgtcccctcttctagacttgtgcagttgactttttggagtctaagtgcaacactttgcatttatcctaattaacttttggcaaatcatttcatttcatcagcttttcaggagcattttctatttcgatttcctcatctagcaattaactactcctttccccatctcccactatttatttcctctgcaattttaatgagcttgccctatggatctttatccaagttgtcaatataatcagcagagttctctgtgcatttttttcaaaatctttctacaatctggcatgtggattacataaatatattgccccgttctttccggctgggatggaaaaaaatgttgaggtcttcttggcttgtagcatcttctttccctggggttctgttggttcatattttctctggaataatttcctattaatgcttaattcttcagcttgctaaattttctctatactcttggtttctcatggaactttccataatgactttagcttcatttttgtcctattaggctagtaccacaagtctcaccaacacaggatatgacgcatgtatgtgtgtgtatgttgaatgtgtatgtatatgtgtgttattctctcctggtaaaaagttcagcctgagggattgagcctttctgccagtagcagagctcaggtagcttcaggtttttaaacacagtgatttcccttagcatcttgggtacacattggcatcgggcacattttctggagtagttctgggaacagacatgatgaagaatgaagcataggggaccagggcctacagggtccccaagcctctgtaaacgacaacaacaaccatcaccacaacaatagctggcatttattgagcctttctttgtgcctggcactgctcttacactttacatgcgtggagtcatttcctatttgaagagttatgtgaagtaggcaggactgtctgcattttatagatgtggcaactacgtcagagaggtgaaataacatccccagtaaggaacaggagaggcagggttcatccagccaggctggtctcagaggctgcactccaactcccagtcatgtcatcccttccagaatctttcaagtcagcctccttttctgtcttctaaactctattctcaagtaacaactagaagaagacaaacatgatgagttcaacttaaatcaaagagcccctgttcgaggcaaagcatcaagaagaatgtcaatgatgtgatctggacacctggtgaaacagagccatcatgtccaatttggggaaataggtggcctttgtattggagcgtgaagactaatgggatccctgtgcgtagaaatgggaacgtggtacagtcacagaaattcatgattagatgctcctgagcccaacttaaaatgatgggagctgcactttgggaagttttatctcatggggatgtttagaacagaatccaaatcttaggaaaatatctccatggtatgtgtccactaactgttttttaaatttctggtttgaggggatacaccctccaagagtagttctgatgaaccttgctgaataatattttccgcctcaagcatctactcaaatgtcggcaggagtcatcttcctttgcagttagatgcaccacttgctttctcttagccgggatctctgggctcctcccaccctggcatcaggtcttgttccaacaggatgtacataagatgtatcctggctggagtcgagtgtgactgcacttatcacggccatatcactgcttgtgtgggctcagactcctcttctcttgtcctaactgccaatctggttcctgacccctgattcattccgcactttggcagcagtgtatcctgtggctcctgaaagtctgccagcacacttaaccacccaccttgtctacctcttgggtttttctacctctctagctcctgtctgttaccagtcatatccattctttgccctagcacgtgccctagtgtattccctagtgtacaccctagcgtatgccctagcatgtgccctagcgtgtgccctagtgggtgccatagcatgtgccccagtgtatgccctagcgtgtgccctagtggttgccatagcatgtgccccagtgtatgccctagtgtgtgccttagcgtgtgccctagcatatgccctagtgcgtgccctagtgcgtgccccagcatgtgccctagcgtatgccctagtgcgtgccctagcatttgccctagcatatgccccgcacgtgccctagtatatgccctagtgtatgtcctagcatgtgccctagtgcgcaccctagtgtgtgccctagcgtatgccctagtatgcgccctagtatatgccctagcgcatgcactagtgcgtgccctagtatgtaccccagtgtatgtcctagcgtgtgccctagcatgtgccctagtgcgcaacctagtgtgtgccccagtgtatgccctagtgtgtgccctagtatatgccctagcgtgtgccctagcacatgtactagtgcgtgccctagcatatgccccagtgtatgccctagcgtgtgccttagcatgtgccctggtgcgcgccctagcgtgtgccctagcatatgccctaatatgtgtcccagcatgtgccctagcatgtgccctagtgcgcaccctagcgtgtgccctagcatatgtcctagtgcacaccctagcatatgccctagcatgtgccctagcatatttcctagtgtgtgccctggcgtatgccctagtgcatccccgagtgtgtgccctggcgtatgccctagtgtacgttctagcatatgtcctagtgtgtgccctggcgtatgccctaatgtacgttctagcatattccctagtgtgtgccctagtgtatgccctagtgtgtgccctagcatattccctagtgtgtgccttagcgtatgccctggtgtatgttctagcatatgccctagtatgtgccctagcatatgccctagtgtgtgccctagtgaatgccctaactcaggtatgtctgcatgctgtggagtccatgatcctcttctaatcggagttttatgacttgaccatagaattgtgcatgtttgcatctctccctgagctttagctactcctggctcctgccttaatccttctagcttggcttcttgccctctactgccctctatgtattctccatagccttagtattgaatttggactgtcaccatcagaaccccaggtcctgaaattggatttcatggcctggaccttcactggagactgcagacttgcaagaactcagagttctgccctggaaacaacctcagacttcgtctttatggccatctgaaatcttttatcatgtccagggtagcatgtaaaagtgccccagggctggactctataaatgatgaattacttagacatactcctgaactccctgtatcccaaataggacagatcattttgtaattaaaaagcgcagcagtgatgatctcattggagagctgtcctgttcaataatgtgttgcagaaatttctggactatctagtactttgctgacattctttctctcctcttcttctctctccagctctagaatgtaggtagaaagtgttctgagtatggggattctaagtggaattagtgagaagccaagggggagtacaatttggatgtaagccgaaatgagtagaaagacctaggctgaatcctggcttctgtcactttctaactgcccgacctgtctgagtacctttgcggtctccatagtctcatctataacctttggaatgggagaaataacactcatctcagggggctgatgcaaggtttaaatgagatcagatgtctccaaatgccttctaaatttagtgctatgcgaataccttaatgagtccacccacaatatctgaattgaaccactaaatcctgtatctggaagacgatcagggtatattttagaagctttcatttacagatgaagaaactcagggagctccaaagccttgctcagagtcacccatgtcttcaaactcttgttccagtttccttttcatttaacaagatgcatcttttacaaattaaaatataacctcataccagccatgtcagcagcttaaccaggtggagtttagaggactgggtaattaataagtgacagtgtccaagacagtaggaccaaataagggaatccatgaaggatggagtcatttaaaggggccatttattgagtgtctaccacaatgaataaagcaagtgaaatgttctggtaactagaacagttcaaactaacttcaaagttagtctggactgtctctccctctaaatgactgacaaggcaaaggctaccatgctaggttcagagcagggagatttatgggttgggagaaatgctagaaccatgaaggatgtagcaccaaaccctcaggaatcattgatgaaagcaagccccctcatcccttttagtgggtacaaatatgtagaaagcctcccacatcataaaaaaatagtacaagtggaattaaaaaaaaactcaagggggaaatattaatctgagaacaattgtatctgagaaagcattcaagtatgcctctgcagctagctggcaaacagcacaagttctgcattttattagagttctaactctgtgtagaacactgaccttatttgagaagcatttcataaacactgacacacagcacagcagcatttgaggccatgaggagatacagggccttctttagggggccagcttcccttcccctcctcggctgcaagggacccctaggacattgtttccctgagtggtaatatctttatttttctctcttaggtttaactcagcaggaggaattttcctaggggaaaatgagggagggggatttggaataaaatttgtactttgggcaagtttgcctaagcatggggtaggcgatggggaagaccctgctctgggagaaagggtctaagaaccttcacttggccagtggagtttctttttggagatctcacctggtgcctggagacctatgctgtggctgtgtcagaggcaggttctcaggcagcattcaccaggtcctttggaatgcaagacttgtggcttgcaaccgccctgagaaacgcgtccaccacatcccctcctgctagaagctggcacctccctttccatctgctgccagcgtacaagttctgaatttgtgccacagaacttggttctgttcctccccctcttgttggcttccctagccaagagattttcaggcttttgaggtatcactggagatcatctggtctactccctccccactgatctcaacccatctccaaagggaaatgcattagaaaggtcaccagagaggacctcagcttcctggtgtggtctgcccttatgaaaaggtgccttcatttctgcctcatcctgtgcaaagatcatgcagagccatgggaagcctctgccaatctgggaagctagggagacagaagagggaccacatctagtacaaaaaaaaatagggaatcatgtggaagcagaggggagaggcaccagatgggtgactcgggatggcagatcatatcctgagggctctcagcaccaagcctgcagcttatttcgagtctagagagggaagatcccagctgaagaaaacggcaagggaaggaacactgggaaccaggactggagcaggaatccaaaaatgggaaggccagttgcttcatgggagcttttaatgactctagttccctaccaacacccctccccttctaattgcttcatagcacaagatggtaaccaatctgctctgtttactctgtttaggcatacattttagtactttctgaaacatttcccataagcttccccctgccgtgtgccctccttgtacattctagaaattttgcaaagacctaagtctcctctgggttctttcctgactggagctgcatgctgattcaagccatattcagtcaggaagctctcttcccgtctttaaaacaagaaacatcttcttccaagaagactgcactacagttttctttgtctgtgttgctaacgaacaaagaggcaacagcatttcacgagcagagcagggctgatagcacctcttgccaaatgtgactgtgtgtagttgtgtggggggaaaatagctttgtcgagaggagggccgagggaggcggctctggggaatttttagcaactgcagcatggtgtagtggaaagaatgcttgcctgggaatttggcgacctggccgtacctctgacacaccatgtgaccttggacaagtcatttgacctccctgggcctcagtttcctgatctttaaaggggatgagggaagtagactggatgatctccaaggatcctttcagccctatgcatcctcacttctgggggctgggatttggggtttagacctgagccaatatccaattcaagagactttctagaggcaagagagaggccaggacagctgcttcgggaagtggctggtccttgattaaggctcaaataattagctcagctccacagtaagccttctgaaattaagaaaaaaaaagatgtttagtttaaaaaaatagcagtcggtgtttcttaaaactgattggcttggggctttgtaggttttattcagagacataattttgcttcctctatagtacagcagtttagattattgatgctttgatgctggagttagtgtgacctggttttgaatgccattagtagctaagtaatcttaggcatggtctttaatagtaacctgcttccctggcttactaggaagatcaaatgaggtaatacatgtcaagcttagaggacagtgtctggcattaaataatcactccaaaagccattattatggctatattttgctgcttaacaatccaccccaaaacttagtgttctaaagtgacaaccattttatcatgctcaatgattctctacgtcgtagtgcagtagagatggcttatttctgctccatacagtctgaggcatcatctgcagagtctggaatgaccaggagagacttgaatacctgggtgctagaatccccagcaggctgttcactcacatgtctggcacctaggctgggatgacttgaagtctgggctcagctgggactgttgagcagggtgtctacacatgtgacctctatgtggcttgagcttcctcacaacatggtggcctctgagtagtctaacttctcacatggttgctccacactctgagaagaggtgtgcagcaactcagaacaactcagaagtagcatggctttttatgaatggacttaaaagcaacatagtaccccttctgctctgctctgtggctctgaacagtacaagcttgcccacatgcaagggtaggggtcatctctccatgtaagaagtctcagaagttgcagctgtgttttaaaacctccacagctatatagttatgatcatcatttttctgtaccatataatctaatctcttaagtagacaaaaagttccttgaggacaggagctggcatttctctatagaagcttagtacaatgcttgtgaaaataagacaaaatcaacatattttcaaaaatcaaattgaattggataggcagcagatttggtggaaagaccaggagcttagcgccaaggagatctggattcaaaaatctgtattcaggcccaggtgcagtggctcacacctgtaatcccagcactttgggaggctgaggtgggaggatcagttgagcctatgagtttgacacctacctgagctacatagtgagaccccatctgtacaaaatataaagataacaaaattagcttggcatggtggtacacaactgtggtgctagctactcaggaggctgaggtgggaaggataacttgagcccaggaggtcaatctgcagtgagccatgattgcaccactgcactctatcctgggtgacagagtgtgaccctgtctccaagaaaaaaaaaatctgtgttcaaaatgtgccctttgaaaaattacttgtctttctcataaaaaaaagacataaagacaataatacttatctcaaggattgttgtaagaactaaggatagtaaatgcaaaatgcctaacacacattcaatgctctaactaaattacagatattgtgaggtagtgtagcattgtggcaagcacctggatactccactcagacaaacctggtttcaaattccatcacttctcattgtgtgaatgtagataagtcccttcatctctttgggtctcaggatcctcatctgtaaaatgggtactatagtaactgtcttgtagggttattgtgaagatgaggaatgcttctgtctcagaccctgacacatagtagggacttaaaatggtacctatattagccacagttaacaatttgtgttcttttgtttgtatattgatttgtccatgaatttatgcactgaacaatgactcatgcaatgctaataactcacaatggcttcatttttcaagtttctgcatggtagtgtctgctgatgcctagatctgggaagataccctcatgggatagagaactagccctttggaaaggagctcagggtcccaggtaagctgcccgggacagtacactattttgacacatccacagctgagttttaattgtccctgttggcttttgaccctagagatcccctggcttcctccagttataatcgttttgctcagaggttcacattttctttcctcaccggatagatcctgtcccttgctgctgtgcagccgtgggcaaacatgttagctcttaccttgtgtctgttttttgtcagtgccttttttttacagcattgttttattggctgaaattcagcaaactataccagccttgtctttgtggtgtcaagccaggtcacgggggttcactttcccgggtagttcctgggacctgaagctctcttaggaaccattgactacgagcttctccttttcttccctaagacctcccaggagccccaaccttaccttttctgttttttaagagtctaaataatcggataaaagacatttaccttgtctttagaaaaatgcacagacctcacaacatttcgcaaatgattttgaggccattcagtggccacttctccggtggcatatttcttctgaatgatccttgtctgtattagtgattttgattggatgaacctttggatttttgctgagtttgactttgggatcatcatgtggctgtgaaattgtcataagtccctcagtcccctccattgtagtagacatgcattgttttctggctgcctaagacccattcactctttcttcctagcagcagcctttctttcattattgggatgtcatcttctgcacccatgggatacagcctggtagatttttgatcagggctcttggcctctcctagtcaaaggctaagtttatgacccaagtcaggtcaattggatcctttctttctggaactggaatcttgaccagaggaacaaggagattggacataatggttttccatttcatctaagcactttcaaaagcatagaccagactatgcctgcttccctcccaccccgccaagacctgttcttaagatgctcattgaatccaggagttcttgatagctttctagagaattccctttcactcaagttcataagattgcaaccaaatttccaaatgagtgagaaagccacaaacaacaaacttctggggagaaaatggcacaatgagaaagattatgcgtggcctttggagaaaggcagaccaggtttgaatcacagttttaccattcaccagctgggtgcccttaggcaagttcatttttcccttaggatgtcagcatcattgtaaaataaggataatgagtcctgaagccctggttctcaaacttgcctgcatattgcaatcatctggggagacttaaaaaattactgatgcccgggccaatccccagagagtgtgatttaatgatttgggggtgctttttggatgttgggattttgtaaaccttgcaggtgtttctgatgtacagcagtgtttgagaaaattgacctcaagaaattcttcaaattatagggaagaataaatgaggtaagatatgtaaaacattcagcataatgtaaggatgataaaagtcactctgttctcctttcctgtcctttcttaaggtgaaccagaatcgcttgctgttgcttctagcacagttttctttgtttggagtagtcatagcaatgcatgacaaccacgatgcaatataacctcacttatttatcccattataggtgaaggacaatcataaatgtagccagaattatagaatatacaaaaatgtgattactttcacatccctggaataactagggcgagttcaacaatcctttgtgagaacgttctatggagtaactgctttaatggagagacataattgatttataattaccatggcaacagcaaaatggagtgatgtcttcctgagggacctggaccaggacccaggagaattctctcctaggtctgccctgcaacttgctgagtgaccttggctcagacggttcatctcataagtccacagtttccccagagcctattttctgacctgtgcatcttcaacagatttttttgagggaaatatattgaggtgacagttgctaagacaatgacgagaagaggctgtaggaggcagaatgaaagcaaggccttgagcctcatagaggagataattatagatgctggttctcccacctgccggcttctcccatatccaacaaaacctatccaagtctctatcttcaaaaagttctttctgtagagaggatgcaaggggaaacttccacgtagctcaggctttctcacttcagtactattgacatgttgggttggatatttttgttgtttggtgggctgtcctgttcattatatttagcaacatttctgacctcttcttcttagattccagctgtacccttgtttcataacaactcaaaaatgtttccagacattgccaaatgtcccctgggggggaaaattacctctggttaagaaacactggctagcccaatgtcaatgaagtatgcttaaattaataaagcaacataattgtgtgcacacagtgtttaatctctgtagtgccctcagaaatttttgcagatgtccatggagcagagatggttatcaggaatctttacatccattgtttcaggtgggggttctgagttacagagaagttaatagtaacagtaataacgactaatgctattggctcacataatttttttgtgtccatttccccccatcaattatttatgtatttatttacatacatatatgcatacaacacagtgtggttttaagaaaggaaccgcaaatacaatagcctagaggaactggacagatgagatcaatgagcaaagctgggtcgagttgagacagattcttgctctgttgccatgctggagtgcagtggcgccatctcggcctactgcaacctctgactccctggttcaagtgattcttctgcctcagcctcccaagtagctgggattacaggcacccgtcaccacgcccagctaattttgtatttttagtagagacggggtttcaccatgttggccaggatggtctcgatcacctgacctcatgatccgcccaccttggcctcccaaagtgctgggatgagccactgcgcccagcctccccctaccattttataataagattaggggaatacatatacaaatctatttctagtttcttttctaaaataaaatccagcaacagaagctcagcttggctctatggcagtaattgactggcttttatgtagatggggtgtgtctccatttcactgcagtccctaccactccctattgtgaccccaacactgagacagtacgtcagctgccatttgacattatgtttattgtcttttgcttgacccagctttgctcattgatctcatctgtccagttcctcttggctattgtatttgtggttcgtttcttaaaaccacactgtgttatatgtatgactgttctcgttttaaaaatagaaaaactgaggctcaacaaaagaaaagctattgcccaaagtcacacagcaagtcatcagcaaagctgggagggagacagacctgagcttcctacctggccagcaaagccctgcccagcatcacagaacagccactggtagagtctccctgcattccgagatgctccagccagatcttctgcaccttagagtttccttgaagaaccaaatctcagtgtcccttttgctcaccaggaaacccacatgtcaccagaatggcaagagtgtcctctgagtgtagcttcccagactacatttttcctgcgtctctgccactctttgggctgtgtccaagggctgctcacacactcccacatagccgaggggccagctggtgtgtgtgcttctgcctgagacgaggccgcttgcctgtggggaggatgtgattgctttaggaaattaagtgggagtgattaattaggaaatgtactgaggatgctggaaagaaatagcagaaaagaaaaaaaaaattggaaccctcaataccaaatgcttctggccacatggctaaggatactgcactcagtgggaccaaaagcatttgatcctgttatttctgatgctgctgctttgatagcacctccttgcatgaggattttggaaggaaccataaagtcagctggtccaacctctcctttcattgaatggcaaatgaaggcacaaggagacccccagcggaagctgggcagcttacaagaaacagcaggacttgggactcagaaagacctgagtttgaattcctgatgcatccttgctagatgtataatcctgggcaaatctccgagtctcaggcttctcactgtgaaatgaaggtagcattgatgattgccaaggatttttgcaaggaattagtgaacaaaagcaagcgtggtgactgctaataagtgacatgtgccaggcacagttttagcactttgtgatttcttaattcttacaaccattctgtgaggtgggtactattatgagttcattttatagatgaggaacaaaggcaccagaggggacattatttacttcatgtctggaagctcataagtggcagagtcaactttcccatgcaatccaattcaagaattcaccttgtcaaccactaagcattctgcctcttgtgcatattatataatttatggataacattataaaatgaataaaatatgaaatgtatgatatccttttatatagcttattaaattattatttacataatatgttatgttaggttgaaccctgtggaattggcacttttgttagaaaaggtggcatagtagtaatttcagagagttcatcctaatatggaatatatgtaagtcacagaaatttctctttctcttccttttctgtatgtatgcatacagattcagctagttcctaactcagaacctcaggtttcctcctccgtaaaatggggctaacactgcctaacataaggtgctgctcttccatgccagtgagacaggatgtggggaaagcacctagccccttgctcaataagtagcatctgttgttattctacacacacctgcaggggtctgctatttgatactccttccttcaccacccttcactcacactttgtttttggttagagagtctccatgtccaataaagcttttaagttacacacaggtaaagtattgggcccagaagctgtatttttatttcacgggactttgatattttcaatatgcttcagtgtaacacaaagcttcctgtcaggccaagctgaatgctgccgtcttccctacatgtaagaattacagtgctgccaacatgagataataccaccttacctagcctcatggctcattcctcctggattttctcccgggtcctcatggtacagcccccgtaccatgaattcttggcctgtccatcaaccttctctttggaaactttaaccaactccagtgtcatctgtggttttaatgcagtgaaagttctctgagaccccttgagctgtgggttctgggccttgcaggagaggctggtggtgatggccctgctctctccccaaaccccttgccaaaatgagctttgagggatgggtagcccatgtgaagaaacatggcggaggggttccttgtctcaaaccttggctctgtacctggaaaataatgaaggaaatgaagtctgccctctcattctggagccacttctgttttcccacagaccttggggggtcagaggaagtagcagaagcagggttttctttgggcctgcgcattaatactggagcgttacagtaacaataagagctaacttttactgagacctcacagtgtgccaggcactgtgctaagtgcctttattgattcattttagtgctcagaagaataggattaagtccaagttaacgcacagaggggatgaatagttttcccatgaatccccacatggcaagaggcagaactgtaattcaggccagtctgtttagcccactgctttggtttcttagtcacaacactctatagcttatcctacttttcaggtgttaccaagtgggcttcctgattctaaagcagcaggttttactgattttcaggcatggaaacaatgcagaaaggtggtacagatggtcgctggaggaaagccccctatttgtgatctcagttgctgcctgggtctcttctgtgtcgccaggcttctatatgggagttccagatcctgtcaacaggggagtcagggaaaagttgagcaggacatcacatccaaaggaatattacaatattgtaagcaggagagaccatttattcattcaacaaagctatagtccatgcacccatgtgcacctcgtgcagtggtgaacaagccacgtcttaccaatttgctcttacaaaaaacaggctcatcacacctactgtgaaggctatagtcaaagagaaaacataacccagaaaataataagtgtaattggaaattggaaccctcctacattgctggtgaaacgtaaaatggtgcagctgctgtggaaaacagtaaggcagtttcttaaaaatttaaacgtaggactaccatacgatctggcaattccagtcttaattatatacccaaaagaattgaaagcaggtactcaaacagatacttgtgtgccaactttcattgcagcattattctcaatagccaaaatatggaaaaaaaccccaagtgtctataaacagatgaatggataaacaaaatgtggtatatacatacaatggaatattattcaaccttaaaaaggaatggagttctgatacatgcaacaacatggatgaacattgaaaacattctgctggccactcgtggtgggtcacctctgtaatcccagcactttgggaggccaaggcaggcagatcgcttgaacccaggagttcaagaccagcctgggcaacatgggacctgcctgaaaccccatctgtaaaaaaatacaaaacttagctgggcatagtggtgcaaacctgtagttccagctacccagggtgctgaggtgggaggatcacctgagcccaggaggtagaggctatggtgagccatgatcatgccactgcattccagcctgggtgacagagcaagaccctgtctcaaaaaagaagaaaagaaaaaagaaagaaaagaaaagagagattatgctaagtaaaatcacccaaacacaaaaggatattacagattccacttacatgaagtgtccagcatatttccagaataggcaaatttataaagacataaagtagattaaaggttatgatgggctggggaggggagaaaggggagttagggctgaatgggtacagggttcctgtttggggcaatgaaaaagttttggaaatatgtaaatggtgatggttgcaccacattgtgaatgtacttagtgccactaaactgtgcgcttaaaaatagttaaaatggcaaaacttatatgatgtagattttacagttttaaaaaatctcatcacaagagaaacaaaaagcctgctttataaaggaggaaaattatagaaattcttttctcatccacctcagcccctagaccttatgtgtagcgcacagcccagcctatagtagatgcacatttctgtttttgtcaagccttactgggaacataatcattctatttgtagttgaaaatggcactgaggctgttgagtgtaaattttactaccatggcaactgtggaacacaaagatgataaatatgaacatgcagcaatatttttggcaggtagagtcagctggaggtaacatgtctccttgcaggtaagtgcaagatttgagggagggtaaattgttaggaattgttacaaactctcagaatcccaaccaggaaatatcctctttgttccaatgaagggcatcccggcgactctttggaccagttgaaccaaagaggatagaggatgaagtccaaattggtaatggactccaggaatctttgttagcagctcttggaagaagatgggaggccaaccacacttttctccgcttattgacgacacagttcaaatcatcaggaagagacattatgggtctacaggtctcctgggctgtgagcagagtcgcagctggcatctgggagaaaaaagaaagaagaccacaatttggcctttaaggaaatagacctgggaggagataaaagggagtcatctcactgtgttgtctgatgggccagaaaccctctttcagaagaaattggtttctgaaagctgatgtgaatttcgtgtagcgttcaattgctctctttctttgtttaggcttagctcaccatttttggattgaggaggcaagacttcgcgtcactcccccgacccatcctaccccacagcccacacactgacatacacacagacatgcacacagacacatgtacaccctttatcactggcaagagggaccagttttacaatccaaaagccttatctgctgcagggtccaccatcctgaccctagcccacccatgacttccctcttccaggctcagttctgagctccatccctgatatggtttggctgtgtccccattcaaatctcaacttcaattgtatctcccagaattcccacctgttgtggaagggacccaggtggaggtaattgaatcatgggggctggtctttcccatgctattctcatgatagtgaataagtctcatgagatctgggtttatcagggcattccactcttgcatcctcattcatttctctcttgctgctgtcatataagaagtgcctttcaccctccaccatgattatgagactgcccctaccgtgtggaagtccaattaaacctccttttcttcccagtcttgggtgtgtctttatcagcggcgtaaaaaaacagattaatacaatccttttccaatgctgtatgtgacacagcgacatcaggacaaagtctggccctctgacactgcagctaggtgaaccttgtttggaaaagtctttaggcagcctctgagggaaggctgggtgattttacagcagtagaaaggctatgggttttagaattagggctgaacttgaatctcattttgacacttgacagtcgtataactaactgatgggtcaccaaaccttagttacctcatctgtaaaatgggtgcagtgatacctgttgtcccagggttcatgtgttcagcacctatgcatgagaagtacttacacaccacctgtgtgtaagtaccaatctcagcagctactgctattatgaaggcacgtaacaaccattttgtgttaatggatctggcattcgagtgcactgacatttgttggcttgaaaaatctcagcccaggctaattctgcagaggttaaggcagcatcagctgtgtgccgtacaaagcgctaacgtttatagatcacttattatattcaaaggatcaaactgatttatacacattatcatgtttaattctcacaacaaccctatgaggttgaacctatttattacatcaaatttccagaagaaaaagctgaggcttaatggatttaaatgacccacacaagaccacccaactggtaagtatttgaatccagatggtctgactccagagcccaggtgcataaccaacaccctgggtgctatgagcaaggaaggaggctgagccaggaagatgccagtgtcaagattggagatgttttctcaccactcagtcttggaagcccttatcctatcatgaagatctccctgtttgcccagagattgttgcttttccaggcttgccaaatccagttcccatcagtcatgcctgaatcagttcattctttccttcattcattccatcaacattcatgtactgaacggctcccttgcaccatgactgctagtgttggagatcatttattggctactgactaggccccaggcactgtactagtgaattttatacattatcttatctgttttttatacaactctgcgtggttggcctctaaaacttaatgcttctttcgatttgacgaaatagatgcataaggaggttaaagtagttgcctttcattgtcccgaaatgtaagtgtcagagccaggattcaaatcctacaaggctttcatcagccctagcccaaggagatgtcttcctttttccaattcccacagcataaatcggtcttctagactagtggttcccaacttgagcaggcaccagaatcacctggagggcttgttaaaacacaaattgataggcccacctgcaaaggatctgactcagtaggttgggatgaggccctacaatgggcacttctagcaagttcccaggtgatgctgatactgctggtccgggaaccccatttgggggattatgatgctgtctgagctctttgaagatagggattctgcctttgttgttcccctagtattgtacagtgcctggtacaaggttgcttgattgttattttggattattttgaattgttcagctgcacattaacttatttatataccatattgtgtttttgtatcaatgtgaagattcttaggctttaccatttaggttttaagctccttggggtcaggaatttcacactaaggaccttctgcagaacattgcacacactagatatttggtaaatattagctggtccttgtggccaaagtcctgaaggtttaccttatcttaagcccaattcaagcttgtaaactcagcctcaaagcataagttggtggatggaattttccaagacttgccgttcacctccaacaatgattctcaaccctagctgcacattgaaatcacctggggcctttaaaatagtatgaatcctggtctctatccccagagattctggtttagttggtctgcagtgtggcctgggcagcaagtgttaaagctccctcaggtgattctaatttgcagccaagactgggaatcactgacctagagcatttggctgcatgactttctcctgggcaatttcagaggctgtgtatgtgcatacacatgtacatgtgtgcagagaagtgggaagctatgcacgcctcttgaatgtacagagtgatcatctctctctctgagatgaggatacaaaggcctggaagccaagcctcaggtagaaacttggcaaagccagaggtacttgagagcatcaagggtgcctgcctccctctcctgtggccacctttggccgagtgccggttgccacattccacggtgaggggactctgtttcaaggccagaggcagggggtggtgggctgaatgcaggtagtatggctgttgcaaggcctttttgttctctctcggttcagaaggggccgccttcccaagggctgaggtgtgggccttagcatttggcaccatgtgtgtcggtgctgagtttattcttgggtttcttggtggaaacacacacggctacttgagacccatgagctggctgagagcaacgggaaaggtcatgcctgggctcccaccccagcaggttgactgactcagcacaatcccagtgtaattaagcatgacaagaagagaaaggggaaagggctggtgcttgcgcgtgtgcactcagcccaggtcccgggggcccagaggattcagaagtgccagctgctctcaattttactggagccaatgtttggctcacctgcagccacctccatctctttttccctgggagctggggtcaacttcagtagacctgcaggatcaagtctggcagagggatgatggggtgagtgcttcttgttcccttcccttctcgtttctcttctcacatggtcttggaagctgtgaatgagagacacgatcacatcagtgcattcaaatcccccactgttgtttaagcagtagcctgggcaaggcactgtgctgggcaccagagtgaggactgattcatgggcttggtttctttcctagcagagcttttacgctaggttggaaaacatttcataattatgaagtctgcagttagatccaattacctacctgggccagacaggtaatataaatgggtgaattgggctgcttgtgaaatcttaggaagtaacagggaccttgatgaactagggactgcatgcccagctgcttgcagagccaacattgcgtaagcagccgagaacatctccagagtagaactaggcaaatcaaaacttaacctgggattgtgggtcagggtggaggtgtgtggtcaggttgcaaacggaacagggactctgccctccaaatgtgacatgaaggtccatttctctcctgtccttttacaagcaagggaactgagggatggagagaagggacgaagtcagatccccagcccccttacccatgggcctcctatagctcaggcactgcccaggcagagaatgttgacatggagagcttgatgggcttctgcccctgcacctgcccagtttcccctactctcctctgtacccacttgcctgcttttccccagcactgtgctcatttgcccattacgagtctatggacccagatgtcccttgggataccctggaagcctagtctgtggtctcagcctcagagctctaccccataatgatagggtctacggcaaggcctctgtagataaagaggcctgtatctgccccaagggttcttcctctgagaggctaaaggagacttggactcatggaatgggagtggcaagtgcttttctctggagtttgaagcactctgtagcttccagggctttcttgcttctggtgtgatgctattttgagcatctctgtctatatatataggatactcccgcagttgttttctttttaattgtccatccacgtgcttgtgttttccacagaatatgttgcggtgaaattgttcctgcaaagcccctgcctccttcctgaaaccctctaccccctcgcaatgccccgtgcaccagcaccgtggccccaggccacgtcagagtaaacaaaccacagaataaaattgcagccattcaagagaggagcctttaatttgagcttaaaatagcccactgtctgagagtttgagggaccaggagcaaggtgtaatcgcaggaatgagcgtaggagactcatctcaggatgactgagaaggggccgtgagctgggagaaaggcaggcatggggattgtgggttgcactggagccccctatagcttattcgaagttagcctctttcatgatggagtagcacatgacatggcaataaaaatacacaggacctgctgcctccatctggaatgcttgtctgccctcctgcctttcctcgaaactatgagcatcattgtcatatcacctacagtcaggaccacaacattgctgaattcctgggccaccattcacatgatgtactccaggtgtgccattttcactgtatactgttgaacgatgccccctggagttgtgtgagcagcaatactggcaacaataagagcaaagagatggagcacttatgagctaggcattgtcctagccgtttgacatgtataaccttgcctagttcttaacccaacctaaggaagaggacacccattttatagattatccacatactacagataaggaaatagaggcacagagagttaaaataacttccccagagtcatgttgctacttctgtcccccaagtgcagaataagcttcagtctgatgcagagtgagaacccacacttttaaccattatgtttcatccaccatactattgttgtgcttgttattcttatttttttgactgccgctttcttgttttcgaccctcctagactatataagcgcctagatcagggtcagcagacagccatgtcatacatgtatatttaggctctgggtctctcagtctcagtggcagctacacaactctgcccctgtcgcgtgaaggcagccatagacaatgtataaacggatcagtgcggcttggttccaagaaaactgtatttatggatactgaaatttgaatttcatataatttttatgtgtcatgaaatattatccttttgattttttccaaccatttaaaaatataaaaaccattcttggctcccaatccatatgaaaacaggcagtgggccggatcgggcctgtgggctgtagtttgctgacccctgtcttggtgtgcggggatatggagcgtgatgtatttattttaatctgtgccttcttaggattagactcggtcctggcactaagttgccattcataaacgctgattgaatgaattactgtatactctttcaggtgtgctggatgacttggggacactgctgctttttgaggaaagagtaaaaatttttctgagcaagggatgagaatccaatctttgtggcaatggctgaggagagggcgggagcctccctcttgtgggtcttcatggatgtttgtaagagtaaagagaattttcatttttatgtaaagtgtagagatctatttttcacaaacagacctacagaacgtgatttgtaataggaaacagatttccctccccttaagataaatggaatgtccccacctcccaaactgagaagagaattgtttcctccttgcaaaggaaacaaattggattctcaaaggaataatcagaagttttaaaaattgtcataataagcaagatatggtttcatggatgatgaaaggatgtttgtcttcgttgggagtggacatgaagttttggttggagaggcagttgggcccttctccctccctaattcctgccccttggcattttatcagtgccacatgggagaagtggcttctgcctgaatggggttggtggtcccactctggtcccactgtcagactgcattctcttcctttccaaatcttcatcactctactgaagtaggtccccattcctcagccaagcttcctgacagctgcagttcattttgatccatgggagagggtattacagatgggagagttgcctgagcaaagtcatggggcttggaatgagcctggtgagtgcagaggatctgcctggctgtttggggacacatttctaggcagctggggcattagtttgaggcctctcatgtcagtaaaggtggagaaccatagagagtggaggagcccagtgctaagcacctggccaaagacagcatcagctgtgtcttgggccaaggccggttgcgtggagtcaacaagagttggtatataagtcagagtggttaaggagagggaggacctgcagtcattggatccaaagggtttacctccctagttcttccctgggtcctggagacatgaaggtgaacccccacagcccttgcccttattgcttacaggctaataaaggagacaagctgggcaccttcaagtccctgagagtttagagcaaagagcagggagctcagaccatccaggcctgtcctccagaatcattactccgtggataatactttgaagatgtgtgaattggggcaagttatttaacctctctggacctcactttcccataaatactatttttggctttcataataacatacgatgatggtgataataagagtgtcccccttataggattcctgtaatatttcaggggagatgaacagtgcctgatatgacatgataaatcaatacgtgggaaaaccattattaattgttatttttatagttttccagcagtacaactttttaaaaaatttataaaatgctttgtcttgcattggctcacttgagcatctcaaaaaccctctgaggttctgcaagtgctgctaacccattttgcagataagggtggtttgcccaaaacacacgagtagtaatgaaactgggactggaggcctgatgctacagctgctgtccagtgttcctcaactccgtgccctgttgccttctctcatggatatgggggctgtgtctgctctgtgggtgatgcccagatgtgtaagaaaggttctctgctttcaaggagtttatatctcattcaaattggaagagccttgatctggaaattggagagttccgcctgcaagtgagggccacttctgctgtctccagcaaggaaagacaggcaggaaaatgactgggagtcttatgtggtgccatcagatgacattcagaatttccttgggtcgaacctgcagagacctgtctctgatttcctgcgtgtcactcggcaaattccctccatgtgtgaaatgagcaatgaagctaactctctggtgcatggtgttagcaccaagttgcatcacattcccccctccgccactcctccttcgcaacagaccttaacgttattctgtgattacttcgcatcatccttcccaaatgtgcatcaaattaaagagttattagggcatggcaggacatgtttatggggaagaatttcctttaaagtcacagctcagcctgaactcactttattagtgtttatacaaagtatgtagcctgttccaatgcagtccatgtttatattcctgcagcaatcattgcattccttgggctgttccttcgttttcttaaagtgattactgcacctatgttaaaagttaatagtgtatgtgctctgtgactggttggacttgggaggtgggcaccattcagaaaatgacacttaaccaagatgtgtcctgcaaatagccatagacttagaagtggtcttcagcccaagtggacaggaagaaggtctccttaagaacaaagacatggtgggcaaccaggccccatatgagtatttccattgtcacccactcctgttgccgatattttgtggctcaagctgggaatgaccatttgtgttgatctgatctttgcctgtttctgtggtataattattaatgacttcccctttaactcacaaaagtattcaagtttggataatcatatggtcattccaattctaactgatacccagatttactggtataagtgaagtacatcaactttagatctcaagccattgtcaattaagggcaaatgtaactcagttaaaactgtcaataaagagctcaagttaacatcagtcattcaacagatattgatttgtgcctttcatgtgccaggtattgtgctgagccttagggattcaaacataaatcagatatggccctggagcccagtaagttggagcttattagtttagctaaactttttgagtatgttactaaaattctctgaccaggtcatttcaatttctctttcaccctttaggactctatatttacttgctgcaagttgattgctaaattttcagccactaatccttgttcatttggtacttctcagcttgtgaccatagacaggtgtcttaatctccctgtgcctctatttgttcaatcataaaatgggactaataagtagcatcaacctcataggctggttgtgaggattaaaaaaggccccaaatgtgaagtgtttagcatagtccttggcacatggtaaacactcattgtagattggctcctgcatagtaaatagcagaaagttatttggaccttaatgttggttgggtgcagcatttgtacctctattgaccggagttaagtggccttcttaaaaacattgcttaaggtaatatgtgttaggatccaaagccagtgagaattattgtgaccctaggggatcagtttattttcctccttttaaagatgaggaaggaaaattttacaaagtcatgctctggattatcatggatgaagatcatggatgcttaacttgggccattctttcctactatgccgtattgctaggtgtatcagttagcatagacaaggctaagctgcagcaacaaataagcccagatatatcagtaacaaaacaatataaagctgtatttcttcctcttcctcccacccacccagtccagtagagctggtctgggtggtggtaggtggcttatgatccatattgtcacttaggaacccaggctgctttcctctgggggacccctccatttatgacacatgatctctacatgccatgaagacaagaaagggaaggagagtgtcatgcttgcaggatgttttatagccttgcctggaaatggcacgtattatttccacccacattccttttcttcagaaatcagccacatggtcccacttagattcaaagggcacaggaaatttaatcttgttgtttgcctaggaggaaaatggaacagtttggtgaacacagagcactatccttgccataccgtattccctacatttcttgccacatttccaaaggttggccccagtctcttctaggatttgtttcctgcctcccggtgattggaggagccattttatcatgtgctctcctatgcagtgcagggaagtgttttgagaacaggccttgcaaggagtttggaagggtttgagatttctgggcatgataagggaaataaaaggtgaaacttttggactgatagtcgccacctggaggttagtgctgagaaaagaatacgttgccttaagtcattacaggaagaatttaggaagaattttttatttctgagtgtgttggctgggttgtcctctgtgtgacaggaaggaagcactgtctctgcagatgctttgatgtgcctgaagtggatgaaggagatttggggtggagctgtggatttgaccaggtgcacctttgtgttagaagcacggaggtcctgccaacatcatcatcttacttgtgctcacattttgcctgaataataatcagccaattgatggttacttcttgagtacttactgcatgaccagccctgggctagaatcactttatacgtatcatctcatttaattcttgcagtatcctaggaggtaggtactgtgattatggccatttaagatggagaaacagaagcttagggatgagttaaataacctgcctaaaatcatgctctatttgctaagatttgagcccaggctatctgattctagggcctgccaccttaagcgctatgtttggcagcagggatctcaaactctgatgcgaaaaaagattaagcaggtaacttgagtgagggaattggatcaggtggactggtgaattgcaggcatgtaccttatgcaaagtgggcaattgcctcttagtaccagcttatgatggccactaaaatccattgttatttgatggactgacctttggagacaagccagaattgtagatttgtatttgaaatgctcccaaattggcaattaatttgcatatgtgaaaatcacagtgagaaccagactacgcaggtctgcaggccagaactcaccggtgggctaccagtttgcaagttcgtctctgctgttcccagtaaagagctagttgtacgttttgtttgtttgtttgtttgtttgtttttgagcatggagctgaactgagcaaaacaggggcagggagtcctcctggtgcaagggatgaaggaaaagagaccccatgcccaatactcctctttacatgccctcaccatgaccacatccaaccacccgggttgcccctctgtttggcccattcttctccctgcaggtagctgtctgcacagggctggctgcaagcttttgcaggtgtaaaattatatatgcgagagtgttgccaagccaaaaatttagcccagagaggcttagttcccaaacaactgaggtagtgtgaagccagtttttaaaatcaaattcagctcatttctttcccaaatgcgtgtatgtttttaaacttgcatgtggttatgtaacagatgagaacgaagtgcaaaaatcagaatagttaataatgcctcctgtggtgtgagtctggagaggtaaagcatgagatgggagccctataagggtggcccaaagggaaacactgctctccttgacctggtaggaaggtgatttgatggttttcaaacacatgctgtttctctctttcatcagggtagctgggtgggtggcattaggtcctttggactggggagaggagacagaggaagacacccattaggaccgcctgatgtgagcagtttcagaggtctgcccttgggctcatcaaaaagcatcttccggccaggcacggtggctcacgcctgtaattccagcactttgagaggctgaggtgggtttgaggtcaggagtttgagaccagcctggccaacatggtgaaaccctatctctactaaaattagccaggcatggtggtacatgcatgtaatcccagctactcgggaggctgaggcaggagaatcccttgaacccaggaggtggaggttgcagtgagccgagattgcaccactacactccagactgggagacagagcgagactctgtctcaaaaaacaacccccaaaaccaaaaagcatcttcctttggctaaatggctaaaattccagagtcttgaatggcttaaactctgcatggtcactttatctatggggagagtcttaggttaactggactccttttttcagtggttttttttggaaggtaggaggtatattgaataatacatgtttactccagaaaacattgataatactgataagcaaaatgtaaaatgtttaaaaaaaaaaaaccccgtttctccaccccgagaaacctagtgtacatttttctgagtgtctccatgaggccttcatccaaggtgtctggaggaagttggggagtatcctcttcaaggtcctttgggagacaaggcagacacacaggaaacaggcagcagcaaggcaacgtgatgaaagaccaaaatgagttgtgcagagagagggtaaatgatccagaagttcagaagttcagggaagggagaagccagcacgagatggagcagctgggggaggctgcagggggagtgtggggtgtctgtgctatggcagccctagcacacagatacgcccagagaaagcctgaacgttgggcgtatctgtatgctagggctgctgtaacaatgtaccacaaactgggtgccttacaacagcaatcatcctttcagacttctggagcctcgcaatctgaaattgaggtgtcatcagggccaggctccttctgaaatctgcaggggagggcccttccttgctccttcctggctcctgggcttgccagcagcccttggcattccttggtttgtaactgcatcactccagtctctgcctctgttgtcacacggcactatacctgcatgtctgtctcgtcgtctttttattatttttcagagacagggtcttgctctgtcactctggctggagcagtgcaatcatagctcactgcagcctctgcccccctgggcttaaacaatcctgccacctcagcctcctgagtatctgggactataggcaagtaccaccatgcctggctggttttctcttttgtagaaatagggtcttgctatgttgcccaggctggtctcaaactcccttctggcctcaagtaatccttctgcatcagcctcccaaagtgctgggattataggtgtgagccactttgctcagccctgtctcctcttctaataaggacaccagtcctattggattagggtccaccctaatgacctcaatttaacctgattacatctgcaaagaccctactttcaaatacgatcacactcataggtagctggggttaggacttcaatatatcttttgaggcacacaattcagcccataacagagcagtaggatttaaatggacgcaggactttgagggcttctgaggccagcatacagacagcaggaacatatgtgccaatgaagtgcctagcacagttcctggatctgataggtgctcaatacatgtctgtggctataaagaagaaagaattaaatgaggcaagctgagggcagtaatgagaacccccttcttattgagctgtggaatgaaattgacatttgggggaaattaatctggcaggattgatggcaggggaatgaggctgagggctcttaaattggtggtttccttgctcggccccttttatggttccagtccccaagcatgttgtcagccccatagatgcctcacagcctggacaccacctgcctctgtgatcccatttggtgtcactctgctgccgtcacctggacctttttgtttccattcttccacctggaaacgtctcccttcagcctgtccttcaactggatccttcttttccttctagtctcagaccaaatctcactctctaagagaggttcttcctggacaccctagggagggcagtgccttcactgcctctcaccatatctttattctcttcacctcaccctgtactgtttcctagctatgcccatattgcagtctgtagtctccttgtttatttgtggtggcctatctccccctgtgttttttattgtcatataatgatagcaaacttcgtggcttaaaacaacaggcattcagcaccttccatttgtctcggccctctgcttcagggtttcataaggctgcacacaagggtttggttgaggttgtgatctcatctcaaggctcaactggagaaggacctgcttccaagctctcaaggttattgggataattcagttccttgcagtctattagaaggcttcaggttcctgctggttgtcttgaattcttggttggttgtgggtagaggctgcctccagttccttggcatgtgggcctcccaaacatggccacctgcttcatcacagccagcaagagaaagagtcctatagcaagacgggcattgccgtcccatgtaacatgtcacaaaggtgacatccgaccaccttttttgtgttgcatgggttagaagcaggtctctaggttctgcccactcaaggagaggggaaggtgttgatactggggaccaccttagaatctgtctgcggcattcagcaaagaaataaaagttccttaaaaggaacttctttgctattgttttactgtctatccttagccatcagcatagtgccaggtctggagtaggtgtttaataaaagtttgttgtaggaagaaaagaagcaaggaaaggagggagggattttaaaaaaaggaaaggagatggggagggaaggaaggaaggaattaaggaaaggagagagagggaggaaaggaaagaagaaaataaggaaagaaaagaagaaagaaggaagggaagaaagatctgtgtttctcttgaaacatgctttaacagccaaataaatctgctggcagttatcctgaggcaatgcctctgggcttttatacatgctggggtttttttttgttttttgtttttaaacctaaaattctttttctctctcttgaatattcctatgccaacctgaatatagccaactctttcttgaggtctcaattaaaatgtcacctgttcctggatgcctcccccgaccctacaccccaattactccatactccttcctccatactcttctgtaagcttttgtttatgcctctggcatagtagagagcaggagtctataaacgacagcccctgggccaaatccagccttcagtctgtcttcgtaaataaagttttattggcacacagccatactcatttatttatatattgtctaaggctactctcacactacaaagctgagttgaatagttgtgatagaaaacatgactggcagaacccaaattatttactatctggcctttaaagaaaaaggttgccaacctatggtatacagcgtttatcatagtctatggtaattactcctttatttcttcctctctaaactctgagtttcttatgggcagagaccacgccactattgtttatagctatataccagcatttagcacaattcctgaaacttaatgatgaagacttgttgaatgaatgaatgaatggtgtatcagtaagaaatagaaaacaggtagaaaattcaaattaggaatattccaggagagttgatttatttacacagggatcatttcagaggtgtgggtatgtttcagagagatactgtagaacccaagaccatagaagcaatggagcaattatcacctctaagccagaagaaataggaagaaaagtgtcctggaaccaagaaatggacagtcataaagacgaactgtaacctttgttggcaaaactagctaacgtgggtgagctctcagggaggacgaataccccgtcctcggtctgatccttcctgcatcccctgcttagctcatagggaagagaaaaagcacagaaccttgccctttctgtgatgtggcccattcaggtggaaagcgtagtgagtgcataactgaaactgaggccactgcttccttgccaacttgttctgatttggttggaacctctttgctggtggtaaatgaagggtcaggaagtgctatgggggcctcttaattctggctcctcttacccctttcctgagtaggagtcctcaaatcacactatgggatttttttttttaaagttgtttattttttttaagactactcaagtgcagttgtgagaaggaggggaaagagtagaacaactacttcaatctgtaactgagtgaacaatccattgagatagctatgctgtgggaacttgaatgtggaggcgtcacacattgaaaggtttattcaggagcaggaggtcttctctctgacttcctgcttgtctactccccttggtgtttagaccacatcccttaacgtttcattttgcaaattcttgccttgttctctaagaatctcctgagtcttagctcatcctcagctagactccaggctccttgaaaacaaggaccaagctatatttcattttctaaaaattcatttggctctgggctcccaaaagatgacaattacagagttattgacaggactccataggtcatgtagttcagcctcctacccatcacaaggatctcctagacatcatgcccaacatgagttaattttgcctgcatagccttgtaataaggaataactgcattgtatggtagcccctacaggtttacttcatgttgagacctgatcttctttcctgaaacccagaaggcagtattctgtaaatactcagtgtacaggggacaggtagtcttaaaagtctggtctgagcaatggtgtgctccctaactatcacagatctcactatcacagatgaacatctttttaaaagtctatcccaagctacaccattgcatcctctccctacctgttgtagcccgtgggtgaaaaattaaccactctgaatgctgtttagaaagtacttccttggccaggtgccatggctcacgcctgtaatcccagcactttgggaggctgaggcggttggatcacctgaggtcaggagttcgagaccagcctggccaacctggtgaaaccccgtctctactaaaaatacaaaaattagccagatgtggtgatggcacctgtaatcccagctactcgggaggatcacttgaacctgggaggtggaggttgcagtgaggtgagattgagccactgcccttcagcctgagcaagagagcaagactctgtctccaaaaaaaaagtactttctcaattgagcctcatggtgatctgacagacgtggtattttgggtcatgttttacaaaagtcacagcaacaacaatgggagttccataaagttaagtgcctttctcaaagccacatagctaaggagtgaaaaggttgagattcaaatccacaccatttgaatttataattgaagcccttttccccacactatgctttcactgagggctgttttttcactccttgctcttcccagatgtgccacagctggaagaaaattttgcaggaatgccacagaatgaataaaaagaagggtatggatatacatgtgccaagataaggccagtggcctgacctagaaaatgtcatttttgtttcattttttccagtgttgttctgaattcttctttctccctaccccacccaaggtgtcaaacagatgtgaaaataccacaaagctccaagtcgcagcattggtttatgattcactgattgggatggggaaaaacaatccaaattaccatggtgatgcctgtttatagaggcaacatggcagatgctgagcaacatgaccaaaaccagacaggggtaaacacagcaagaaagctcttcctccttgagcttgcagaggggctcagccacttcccttggccaggacttcactgggagacagggtaggaaatgtgctctgttagctggagtgggggaagcaaagttactaagggtatgtctttgtttttctccaaggcacgggagtgggaaattctattatgtttgtttgtgcatttatttatgcattcttttaaaaaattcagtggataacctgatgcagtataaaaaaaatgctctaatggtaaatgagcagtaggatgtgataagtgaaactatggcctttgcattcagagagcccaggttcaaatctcagcattacccacttccctggtatgtgaactcatgtcaaatttctttattggtaaaaatcttctaagcttagggtggggatgggggaaactaaacttcagcttcctcatgtgaaaaatgaggtaatagtacctaccatatatggttgctgtctggattagataaatgaacacaaagtcctcagcacagtacctggtgcgtagtatgggtccagcaaatatcagcttttattaaggctgatctacagcattttaattcgttgaagtaagattacctacctttcagaactgttgcaaagagaagaagaagaaagcatggaaggctgggcatggtggctcatgcctataattttagcactttgggaggccaaggtgggcagatcacctgaggtcaggagtttgagaacagcctggccaacatggtgaaaccccatctctactaaaaatgcaaaaaaattagccaggcgtggtggcaggcacctgtaatcccagttacttgggaggctgaggcaggagaaggagaatcgcttgaacccaggaagcggaggttgcagtgagccaagatcgtgccactgcactccagcccgggtgacagagggagacaccgtctcaaaaaaaaaaaaaaaaaaaaaaaaaaaaaaaggaggcatagaaagctattgtatcaaagatattttatttgtcagcgtagactgccataacaaatagtttccacatttcagtggtttaggagttatttcttgaataggtctgagtttaatgtgtgtaaatggttgtggggcggggtgggggcggggaggttggggtggggggctgtggggatccaaaggaggagaggcctctgtttcatgcagtcattcagggactcgggttctttcagtttcccatccctgggatcctccagtgtatctactgaatcccacccaagatgagagaagacagtgtaaaggatggggcagaaagttttattcctcaggcctgaaggcagcatatagtacttgtgctcctgtaatcgtgatgagaattcagtcacatggttgcacatacatgcaaagaaagctaggaaatgtaatctatctgtatgctcaggctggtgagttgtccacgattatcattcatagagcattgtggcagactggtgagttgtccatgaaacctttttccctctgtcttgagcacaactcaaaacaactcaccagtctgccacaatgctcaatgaatgataatcattactgtgattagtaacctaacatcataggtgattcccatggtatcctaagccctacttggagggaggggcatctctaattatgcagtcttttctcctttgagcttgagagaaggaacagttctcacctcgttcccacaataactcgggagccttctgcccccatgagccatccttgaccataatgacaggactgaggttctcagaggtggcacaaaagtctcagaaaggccttgccaccaaaagccatgtgaatggggttccattgctaatggtaaatattgtgtattcagaaggtggctttctcctcctttctgttccacctctctattgttataaaatgaatcaccccaaaacttcatgcgttaagacacagtggtcactttggtacagtaatgtgtgtttaacgacagggatacattctgagaaatgtgtccttggcaatttcgttgttgcgtgaaagtcatgagtgcacttgcacaaacctagatggtctagcctactacacacataggagatatgggtatagcctattgcttctaggctataaacccgcacagcaggttactccactgaatactataggcagttgtaagacaatgctgagcaatggtgagtatttgtgtatctagatatatctactgttttgttgttgttcttttaagagacagggtcttgctatgttgcccagtccagtcttgaactcctggattgctcaagcaatcctcctacctcagcctcctaagtggctgggactataggtgtatatcaccatgactggctaaatatcagacatagaaaagaaaggcacaaaaataaagatacggtataaaagataaaaaaaaaatagtatacctaaataggtacttaccatgaatggagcttgcaggactggaagttgctccaggagagtcagtgagtgagtggtgggtgaatatgaaggcctaggacattactattcactactgttgacttgacaaacactgtacacttaggctatgctaaatatttgtacatttcttcaatagtaaattaaccttagcttactatataacttttttttgagggacagagtcttgctctgtcgcccaggctggagtgcagtggcgcgatctcggctcactgcaagctctgcctcccgggttcacaccattctcctgcctcagcctcctgagtagctgggacaacaggcacccgccaccacgctcggctaattttttgtatttttagtagagacggggtttcaccgtgttagccaggatggtctcgatctcttgaccttgtgatccgcccggcttggcctcccaaagtgctgggattacaggcttgagccactgcgccctgccaactttttaactttataaacttttaatttttttttattccttcgtaataacacttagcttaaaacgcaaactgtataggtatacaaaaatattttcttcccttgtatgcttattttataaactttttttactttttaaacttttttattaaaaactaagacacaagcacgcacattagcctaggtctacacagggtcaggatcatccatctcactgtcttctgcctccacatcttgtcccactggtaagtcttcaagggcagtaacacacatggagctgtcatctcttatgataacaatgccttcctctggaatacctcctcaaggacatgcgtgaagctgttttaccattaactattttttaaaataagtagaaggagtatgctctaaaatagtgataacagtatggcatagtaaataccagtaacacagtcacttattattatcaagtattaggtactgtacataactgcatgtgctgtacttgcatacaactggcagtgcagtagatttgttttcaccagcgtcacataaacatgtgagtgatatgttgtgttatgatgtcactaggaatttttcagctccgttatgatcttatgggaccaccatcagatatgccatcctcattgactgaaacattgctatatgttacatgactgtattatctcttacagcttctgtgggtcaggatttcaagagtggttcattcagctgggcgattctggcttagagtttctcataagttataaccagatggtggctgaggctgagtcccaaaggtatctgcacctaatgtgcctgacctctgggctggaaagactcaagccagggctggcatctctccctcatcctcatcctcttcctccatgtggtttcaccagcatggaggcttcagatcatctgcttttctcatatggcagctcaaggctgcagtacaagtgaggggagcgagagagcaagcccctcccctattgcctcttctaagctagcctcagaagctctgcagcatcatttctgccacagtcttgtttgtccagcagtctcaaagcctgctcaagttcaagggaaattggcatagacaccatctcttgatagcaagtgtatttaaaaaaaaaaaagaaagaaagaaatggcagacatgtttggagaccaccacacttcccacatccacatctggacactgtccttggcccccatccaggatcacccctcctgctgacagttcagaacccatcccaggctgacatacactgactcccttgaggccagagctgaaggtcataaaggtctggaggagcctgggccgggacagtgggggctggccttgggacaggcagcctctcctcagggtcagtgtaatccattcccatttctaaccgcgtgtgttgaatccccagctttgtgtttctcatcatcctatggcctgcaagtaggagacaaagctcctacaaagcatgcaggcccagagaatgtaagtaagttactcaaactcacccagacccagctgtgtggagttgggggctagaggtatctcacctcaaagcccacgtgctccctggccttcctggcagtatgtgtgtttgggaggtgggcagaggcaggcagcacagctcagtgggaggggagagcccatccctcctccgtagcccctgtgtcacttgcacttagatactaaggaaatagaggtcacagaaatgctgcgaaggacaggcagtgggctgggggagtacccttggccccattattctatttgtcagccacaaaatagatgcctttttttacccgtaggaagagagcacaccaacaaggagtgtcttggggaccccaggattcatccgtgggcacaaagtttggggtatggggctgtcagcttctgctggtgaactgaaatttcaaagttgagatgggagagatgcgcttcaactaattacagtaatagctgccatgattgagtacttaacaagtgccagataagtgctgtgtgtacatcatctcatttaaccctcatcaaagctcctgaggtcaagattgtcagcctcatttgtaaatggagaaaccgcacctcagagatgaagtgcactgccattagatcactcagtaagtggcaggacagggattcaagctcaggactgcctgcctctgaagctcagctcccaaacactaactctgtgccggggacagtcccacagcacaccttctgccccccgccacatccttagcatttcagcagtgcactttgtgtgctttgacataataaatattcaaaatattagtgctgcagatgctggcacaagctgctgagataccatgctgtgtcctggtaattaaacccttggttgcattgtcatattcacagttgtcaaggtccccaaacatccatctgaattcagatgggaggtaagaagaacacgtgtgatgctttggagtgtgtacagatttctgtctgcaggtttcccatccctgcatggataacccttctttattttcctgggtaattcttgctatgcttttttttttttcttctaaaccagcactcagattagccagagaagtctaaatactgcttttctccatcacaagctagttcagaaacaactttgatgctgttttaggtattggaaaactcaaggaggaaaggaggaggtacctgtgtgaggttactcaaggactcacttgatttttatttcagtattatgtctgataccaggagattaatccctcctcaaacttgaattttttatatatatataaagtgctggaatctgaaaatgcctttcctgttcattttatgcaactgtataaaggaggcataattgcagggtggcatctttaggaagcaactaggaaaaccgaagagatgaatgtttggatggggattcatcattggaaaaatggctcttagtatataaatgttcagaaagaaaagacaattcacagataccttgttgaaactccaagggccaaaaccctgaaaagtgagggttaaagagggcagaatctgtagggatcaattattcagcatccattattgagaactgtagcatattattcatggttcctttttttggcgttcagtcttgttagattattttagtgaacacggaatattcatgcagttgttcacaggcttgttcgtgacttcagtttttcttaactgtttttccatcatccatgctgccctccaccctcacttcaatatcaccgccaccacttcagctcttctatggcaaatccttctctttggggctatattcaggagcttaagcctataaattgaggcaggagtaatccatgcaaatgtctttacctaacatgtgaaatgagttaagttacctctactgggtgccaagcacatactctatctactatgttgggtatggagttaaatgagatgtggcctttgccctcagggagtttgcaaagtagctggaaaatagacaatttttgtcttgtttgttggtttctagctacataccaaagtcaggcaaattcttttgatttcaagtgatagaaaattcaactcaaactggtttaaatcaaaatataggagagatgggatagaatgggtcatacactctcaaaatacagaggtatctggcttcaggcatgagtgagtctggacattcacaggagagcaccatctgctcactgtttttgtggcggtgagatggcttctggctaccctgaacagcttagcaatcccagtagataaacagttattgggattttgagtcatttaggcatttctgaaacatttgctgtggtcaggaaaactgaagatacttatcagcctggcctggatcagatgccagtgcctagagctggaaagaggggtcagccccatttgtatgacatgatctgagagttgggggaggggaaacttcaacagaaaaatttgttacctaaagaagggaccacagaaggcaggcagttacatataaaagagttctgctatgtgcataatgaatggtttattccatacaatatccttaaggttagccgggcacgctcaagggatatcgttaatcatcagaattgccgccttctggacaagcaacatcccttcagtccaagccagtctggattaaatagaccgtaattgtaacccacaaaaatctgacctgaatttgctctccattgcagtgacctggacagaaataatatcaccaggatcaccaagatggacttcgctgggctcaagaacctccgagtcttgtaagtagttgatggctctcaagtgtgttttcatttttagctcttcagcctcacaaaaaaatgttccactgcccctgacatcacactcccaagccctggacaacaggaattcaccattctgcagcagaaagcccctcgttagcgtacccacatgcttacaggtatcacattctgtgtctagatgctgctggctgagctagatcgatggaagaacttagttccagtgatagggaaagtggaaggctatgaacaaataaatcaccatgcccagcttctaggatgacagcgatgtcaggttgactaaccatgcttccctttcatagagatgataatttcttctccagcctgtgcattaaaagagcaatcaggacaaaagttatctgtcttgtagcttaatggagaggaggggaggagagcatcagaaagggtcagggcccttgctgaacacccacagctgtgcagacaggtagcaaaatttgaaatgggcattgatggactagaggagcaaggaatattaggtttcattgctgaatattgaacactttcatcaatccttaagtctgtgagtgataagaaacttcccaagtgcttgtctgtcaaaaagtctaagacattcagaggtacaggaaaaagcaatttagattttattttccatctttacttggtagttaattttgacccataagtgtggctccatgcaagaagtacagactgggccaattggccactgccttggtatttgtatgccatggaatcttagctggcaaattgttactagaagtgacagctaaagtcttggtacctgaagctaccttctttttactaatagccctatataataaatataatgaattttgtatttggttcagaaagtaccaggctctggtcctgattcggaattagctacccatgaaaccttgggcaaattatttttcctccttgggcctcagttttctcatctgcagtatagggaatacgttgttagaagtattttcaactctcatagttacacgtgtagtgcttcattgttttaacattttctgattatttttgtgattacttgtgaagcgttaattttacaacattgtttgccatttctgattgagttgttagtaataatgatgatggatatgatactttcatgggctcagcacagtattacatagtggtaacaaaaaggtggggcattattatgagcccctatttgtagcagaggaaaccagaggtgcggataggttaagtagacccaactctacatagcaggtgactgaaggagttggaattggaacctagactctgtgctttctaacctccatgcagtgccactgtgtattcacattatagaaagctaagaaaactaagacaatgatagtctacccattttgtaaatgcagcactgataatgtgggggcttgtcagagtttctgttatgtacacatgtgtggggacatggggaatctgaatcctgggactccagcttgcagatgctctccacaccgacatgttctccgtctttggtctcaaacactctcctctcaccaccctcaaagggaaggcacaccctgtgccaagtcttttgccccagcagccatgtatctgtcaagtaactggtagttctgacaaggtgtgcgtggatcagaatcgagactgagatcagggtgggggaattccatggttcagttttagggcgattgttattgaagaggtataggtagcaactcttgattctatgtcatttgccaggttaaaaaatagatgcttgtttaccttctcactttatttttttttatttatttcccctgcatctgtgagagatttccttttatatttcacctaatgcttcattttctaacaaagtcaaaaacaacccttgattttcttagcgttacatcagaaagactaataaaaactccaattttcatatctgctttctgcaaatagaaagtttaaaataatcacaaaagattgttttaatatcccctggatggtctacaacattcctttgactacagtttatcttttcagttaattggtacattcctcttattttgataagcaatgccaaaaagccttcccctaccccccatcccccagtagactattaatatactctgtttcattatcttccttatcaactcaaagacaatcccattcaagtggccctttattactgtgaaagaatctgcctggtggaatagctgaaatgctttctaactaacaccaataaaatatccagacatttttaccatatttttcctcaatcgattctttttagctgagtaacctagacaactatcttttttaaaaagatttttttcacaccttggcacattccccatatctgtttcttatttacaatttctagagaagctagaaaagattcagtagtcttgaaaaattggccacccaacagtttctgtgtcaaactgttaatatgggcaaaagcagataaaatggagattgaggaacttcagtctcaacccagggcaattttccccaaatgaagagcatttaaggagaagatagaagaattgcccaggacatttttttttctcccatgggatgggagtaggaaaaagtctcttctggtggtatcaattatgtcccatttcttggcagtctaagggctctgctatgctcacaatgtgggagccagctttatcccaaatggggttaataaaaaagttaaactccaccccagccgtcatcacatggggggcgatttccgatcctgatccagtgctaaagctaaaaaaataacaatgccaaaaaagctgaaaatgaacacaggctctgttctaattcagaacagactccagccatggacagcctttctgggtgtccagcccttcccggattcccctgtctgaaaatgtggggaaggtatcagtggcttttagtgcatgctcctggcttgcatctcagcccagaagtctggatgggagggtcttagctcattcattcactgatccatttattcatcaaatatcgatgatttgttgagcctctgattgccaggttctaggctggaatgtgatggaactaggaagtagatctggaagggatgtggatacttggtcagtgagggtcccagcagaaaagagggcaaatgaggagagcgaagtaaagacttatttagcggtgtgggcaagattaagagaaacgtagaggagatagtgtagttccttgaggctagagtcaaaacggggtcactactgtcccctgggccttaaggagcacagggaggaagtggttatcagagcctggcaaaagtagggactgcttgacagaagctgtggtcttaggtagagggatgcagtcagcctgaagtggcttggcagggaaggagaagagtaaatcccccaaccacactcttcctccaccctctgatctcctgccggtgactctctttggctgaacctgacaggaatccagaagtcaaaaaacttcttgatggtcttgatggctagatgtggtggctcacgcctgtaatcccagcactttggaaggccaaggtgggtggattgcttgagctcaggagttcaagaccagcctggacaaggctgcccaggctgggcaacatcgtaaaaccctgtctctatgtcccctcctaaaaaaaattaggtgggtgtggtggcatgcgcctatagtcccagcaccttgcaccactgcactccagcgtgggtgacaaagtgagaccttgtcttggagggaaaaaaaaaacttcttgatgaagccaataaaagtcagctttccagggcctgcacaaggtggaaacggtgtatctcatatagatatccttgcatctcttctattcccatctctgaaagaagcttgaagtgttagattcattagcacagaactaagattcattatagaagggctgggttaggctccctcagaaacccagagggaatgtggtacttacaataccctagagttggtccttgtcatccagcaaggaaataatgactacaaagtctgtgactgatttgattggtggatggatagtaaaaacttagctcagcaaacctccagtcagtagtgttgaagtgggaccctatttagcgtgacgtgctagtgtgagactattagcattccaaggccctccttgcatatggtggaatggaaaaggaagacgagaagggaaaaacatttttttttttttttttgagacagagtcttgctctgtcacccaggctggagtgcaatggtgcaatcttagctcactgcaacctccacctcccgggttcaagtgattctcatgtctcagcctcctaagtagctgggattacaggcacatgcttaattttgtatttttagtagagacagggtttcaccttgttgatcaggctggtctcgaactcctgacctcgtgatctgcctgcctgggcctcccaaagtgttgggattacaggcgtgagccactgtgcccagcctttttttttttttttttttttttttttgagacagagtcttgctctgtcacccaggctggagtagtgcagtggtacgatcttggctcactgcaacctctgcctcctgggttcaagcaattctcctgccttagcctcccaagtagctgggattacaggcatgcaccaccacacccagctcatttttgtattttcagtagagacagagtttcaccatgttggccaggctggtcttgaactcctgacctcctggtccacctgcctcagcctcccaaaatgctggtattacaggagtaagctactgcacccggccaacatttcttaagcctctaattgtatagcagaacctgggctagatgatttacttatttattccatttttgttctcgtaagaacttttgcagtgttttattttctctgttttacaaatgaagaaactgaatctgagagaggttggctagttaacccactcttatatcatcagctaatgtgcaagcaaaacagggcttctaaactaaatctactatgctcaccagactgggagttagaaggcccaccctacctggctgtgggaattggcataaataatttctcctcgagcaagtcttttagcctctcccttcaatcgtttctataggtgttaagtgaggagcttgtaaggggccagaagtaatagaaatgtgagaagcagagcagatgaggacatggcaaactgtggggctggggaccctcgcctgaccagttctacttctggtcaatggatatttggaaatgtgagagctgatttgtcaaaaggagtttcttttgcggggtgtgggtgtgagtacatgtgaaatatcttgattttcaactgttggcaacaaattcacaaaaatgtaaaatatcatcgagcccaaacgaaacagttacctgtcccagacacatatacaatcggtgtgtgccatggcccaaagtcttctataggttttcattcattcagtaaggatttatgaagtgcctgctgtgctaggcaactgtgttaggactgggagtaggatgatggacagaatgtctatcttcttgctccttaggcatagtggggaagatagacttgggaactaaacacaagggcccaagtgttaaggctgagaagtgcaggaggttatgaaacatctaatggggagagactgtcatggagcattcagtttgatataaagatgcagccttcccagggttgctcttcctctccatctgccatttgcttaggtgcttgtgggtacctctcctcctgagtaatccagaggaatccatagcccttccgaaactccactttctaaagaaacattctccaatcacaattgcatccccgttaagtcccattcagccaccatgtgcaatctgtgtcatttcccagcctaaggtcagcccccaatggaagctacatagcttcattgtttctctcccctgctgttcagctcatccatttaagcggccattttttttttaagttagggaaacaaacatttcattatatgctaaattctttggatatactctatgcgtgaaccagactcacttatacagagtgtttaggatttgtaatcacctgcttggaggactgaggcgggtgagtgaagcgtgtggctggagggagggagcctgatcttttaggaccatcatcatgagattgggattagctggggtctcagtgagaggagttcctgggaccaggctggttttcttagcgacagccagtcgtttcacaatagcctcaccctttctactagggtgagctgggaaggcccttttcaatgaagtatttttgaatccttggaggagggagctcccagggaagagatgctgaatctatgtgtggtttttataaagagcagcttttacctcttccttttctgtgcaacatcctgcagtgcttggggggacatttactgagaacattcttaaaatagaggcatggaaaccaatctgtcaggtagaagtgtgcaggcggcaaaaccctggttaccgtgacaccaagctgggatatgagttatcttgtcccatcagactgatcccagttgaagggacactgacgatcatgggaagggctgagtgaccatgcctgcatggcatgaagcctagtatgagggtccctgagcccagctttgtccttagtcattgctgtctctgtggttgtaggcatctggaagacaaccaggtcagcgtcatcgagagaggcgccttccaggacctgaagcagctagagcgactgtaagtacagtacagcctcctttcttaaagtatttatttacatttagtgttttttgttttgttttgttttgtttttgtaaattggccttataaccttgttaaaaaaggtctccagtgtttaaatagaatgtttgctattatacttaaggcacattagatgcatgttaaagaaacactgagatccacttacactccttttctgtaaaagttgctagaatcagctttcagggcttgtttcccttcttctcaggcttgagctctgtcttggtacctgtataaggggctggtttttacccaagtgtaaaccttcccttccacggaggagggaagtctgcagttatccctgccatgagatctggcatcagatagtccctagtcctctgcacgggcagaagctccctcctgaggccttctcctccctgagtgttctctgccccactcttgcggggagaggaaggactggtgagtgggcgcagccttcagcgcgcttgtatctcctgtgagtgagcatcagcctgtgtcaagaagcccccacgtttccacgagagaatgcattgccagtggtttaaaaataggccactgttctgactcaatgagagggaaagaggaaaagggatgggaatggaagatggttggagcctccatttgttttgttgatgaatacttttgcagaaaactcttggattactttgaggagagctgctcagatggttaagtaggcaacttcacctttcttctgttaatcacatctggcagctcataacatctggatatttgctttctgccctctgagcagggattgtccccaagagcacttagtcatgctggtgggtggctctcttcaaagttctctctgaatcttggttgccctgacatttcagcctctttcttctgcagtcagagggatgaagctgcaacagctcacggctctgccggcttccctagaagaactgtgttctgtttacctgtctggttgccaaatctcatttacagaggtgggcttgggtaaggtggtgtgcttgtccctgactagttagctttgagatgtgccatcttttcccctggagtcaatttatctggggccacataagaacagggaaggtccccattgcacgtcagttagtattacccagaaaaatgctttcctccctctctgttgtgtgaaccgtctcatttattgttctccttctgggtcaaatcccagcatatgttctgctggtgttggtttgaaaatatgacatttatttcttgcaagggaaaataattataaaaagaatgaatgttgtctctgtttacacgtttatttttaagtttcttaacactcaagttcttcttatttagaccaaagagaacataaaagtatttgttgaacctggttcctttgtatgaaatattcagcatttctacagaaaaatgaatacgtggtcctttgtgaaaaggccaccccttgcttagccttctgattagaagagtgaaaacaattcccaattcattaatttcctggttttggggaaggaactaattgagtaccttggacatgccaggaactatgccagtgttttacatgctatttgtatttttttattgccacaaaaattcctatgaggtgtaattaccctcattttgcagatgaagaaacagacccagagagactgagtcaaagaatggtcaggaggggagccaagattcaaagccacttctgtctgacatgaaagatgatgttctttcatactcatgtgcagcagatactagatgaagtgtgatctttagtaagggccctgagagtagcctctcgcataaacatttaactccagggaatatcgatgaaatattttggcaaagcctcttttctttggcttggtgaacaaggctgaaatacccatgcatgtctggggaagtgaatggattacagttgcagaggaaacctgattatttctccgtgttggtgtattaggtggggtaatgctagctgctgtgctagataaaccctcaaatctcagtgacttaacacagtggacgtttacttattcatgtaaaacccaatatgggcattcctgataaggcctctctcctccaagtggagactcagggacaaagtcttcttcttctcctcaactttaccctccttaaatcttggcttccaaggtaccagtgtttgtctgcatcaagccaggagaagagaaaacagcatgaaaaatttcacatgggaagtttgcagatttcaagaagtacatgtcacttccagtctcacatactttgggctagaactcagtcatgtggccacaggaaactacagaggcgggaggaaaggtagttgagctttgtgcccaggaagtagaggaaacaggcttagtgaacagttggccaatctctgacttctattgcaagtgatctgaagaagtacttaatcaggaagaacattagaaacacaggcagctgggttcatatacacagctgaatagtcattctcataatacctttcagtgttagcaagaagggatgtgtgtgacattaatcctgataggcgttaatctggttttggttattcgttctgttttcatacagactgggagatgtagaattggaaaacataatacatttgctattaataatatgacggtggattgtgcctttctagctctttctcctggctcaccttatctgtgtctttgtattttgtaatagataaatctttattgatcacattctaagatagagcctggaaataataggggttataatacttcatttctggagggtttatttccactctgagtagtcattattggtttgttctcttgggtcttcctgggaaagggaaaggaagtctgtcctctgggtctcaacttagaattctctattcccccatgaaagtaccctatgcctctggctgagttaggtacccctactctcataacacaggtgtcttcctatcacaccacttatgacaccatattttaattccctgttttctggattgtttcttcccaaaaccatgactgttgaggtcaggattcatgtcccatttagctcctaatctcacagacttgagcgaggcatgacagtaagtgcttgaggaatatttattaaagcgcttgagtttttgttctatataagtgattctaagctgggcctaattttgccttccagaggacacttggtaatgtttagatacatttttgattgtcacaactgggagatgccacccagccgatggggtataggaatatctcaacatctttaaatgcacaggacggccctacaacaaagaattattcagcccaaaatgtcactagtgccaaagttgagaaattctgctctttatcatatgtcagatagcatgtcaggcactttacatataccatctcatgtaatcgatgcaagaatactgtgaagttagaattatcataaaatatgatgtgataaaacatgaaactcaaagtatcacctacgaagtactttgcttaatatatttacctaaacctaatttagctggatctcacttctggttgccagagagtggatgggatataggaaaaagttaaaccaagaggaaacaaacacactttgtaagtgggatattctttgagacagctgccctgatcttttaaaaaagtcaatgtcaagaaaaacatgggagttgacttttaagttcaaaaaaagcttagaatagaatagaaacagtaccacaaaattggaagggtcaatggaattaaaatgttctaagatccttaaattattcaggaagtaatagtgctaatatttattgccttattaagtcaaagatgtatgttgaaatctgtagcatagcctctaaaaaaaaaaaagccaaaaaattatgatagtctcaggggaaaggagcacagtatgatacaaaatatgaattaaaatgaaggataaaagggaaggaaaatgaacatagaacaaatagacaacaaacagaaagatgatacatttaaacatgaatatatcatattaccttatatgtaaatgcactaattctccaattaaaaaacatagattgtcagtgtatttaaaaaataccaaacatatactttttacaaaagaataacattaaacataaggatagagaaaacttgaaagtaaaaaaaaaaaaaaaaaaaagaaaatgatagcatgaaaacactaaccgaaaggttagtgtcactctattaaagataatatagactttaaagaaaatatattagatataaagagggaattttgtaatgataaaataggaaatatcccaggaagatataccaaatctgtatttgtatgtgtctaaaaacatagcctgaaaatatggaaagcaaatattgacagaactaaaaaaaaaatagacaaatttataatcatagttaagatacactttttggtaattaatagaacaaggaggtacaattcttggtaaaaatatagaatattaaataacaatatttgtaaacctgatgtaactgatatatagagaacactctaaacaacatagaatagacatcttttcaagggcatatgaaagttttattatatactgatctagaaagcaagtcaacaaataccaaaggatatcatatggagcatgttctctgtcagcaggaataatcaagaagttaataagaaaagtagaaaaatccaaaatattttgagattcagtaatatacctctaaatactccgagttgaagaacatatcacagtggaaattagaacatatttttctgaatgttaataaacatacaatgtctcacaatgtgtggactgcagccaaagccatgctcagaggaaaatgtatagcctttaagctatattattcaattcatggtatatattatgtatagtatctattttaaaagaagcacatatcttgattaaaatatcctccttacaaagttagggcaagaacaacagaacagaagaaaggaaattattaagagcagaagtataagaaatagaaatgaatgtataatagaaaaattctaaaaagccaaactaattcttgaagcaactaaaattacagacactgacaagacatatcaaaacacaaaagactaaattaccaacatgaagaataaaaagggggatattagtatggatattataaatattaaagtgataataggagcagactttgaacaagtttatcttaatgattttaaagagtaaatgaaattgaaaatagaaacaggaaggaatagaaaatctgtcttatatcaattagagaaattaaatatttaaaacattccatcaaaaaatctaggctcagatggctttagcaataaattctaacaaagttttaaggaataaagtatagcaacttaatacaaactcattctgttaaaagaatgaacatttgtctatttagccagcataaccttgagaacaaaacccagtaaggacatttcaagaaaaaaatataaaccaatgtgattcatgaatatttttacaaatttcctaacaaaatactagcaaattaattcagttataggtgaaaaggataatatattccaaccaaatttagcttattcaaagaaggcaaggttggtttaatagtggaaatttcacctctcaaataaaaacatgctgaaaaactaggacagcaaaaccaaagacatacacaacatctacaataaaattatttggagcagtaattcagtgaatccccagtagatggtttcaagactgttgtggtatctcatctgtgtgggagaaagcagagggaaggcagctacggttcttaggaccctgagaagagggcatcccttaaattacccatctctactcattggaaaatacagtggccaatctgagaaaagctgcaaaatatagaagagagttctatcagatccaattcatggtaagtacaaaggaaccatgatgtaataatgactgataatacttggaacattctggggcctataaactcttcaaacaaaaatgaggctcttttcctaggaaaggtctaacattggtaagaaacttctgggagcagttgatcagaaaaggaacaatagtagaaataaaaagagaactccttgagaagtataatgttagaattcaccagaagagtcaaatcttggaaaatacaaggccatgtttttcattgctttgcaaaaaccagaatgagctctagagtcttaaatcttaaaaaaaaaaaaaaaaaaaagctatttcactgctccattctaaaactacagggaaatttatttcacttaaaaaataagcagttaaaaggattctgattgaagcccatataaaggtttttaaataagaaaaagtatgagaagcagaactttcttagaaacaatgaaaacatataaaaggagatacccacaaagcaaataaactgtaatagaatagttgaaaactggctagaagaatttaagaacatataaattataagagtacaacataagtctgaatttcaaaaactcagaaatttaataagagaaatgtaggatttgaaaggaggggtgaagaactcaaaaaagaacttaacaatagaagtacttcaaaataagtactgccaatacaatactgaagaaaaactaacttgtagaaattacactatccagtttcaagacttactgtaaagctatagtaatccagacagcatgatatttgtgaaaaaatagacacacacatcaacgggacagaatagcgagcccagaaatagacctatgcaaatacagttaactgatttttgacaaatgtgtaaagataattcaagggagaaggaataatcttttcaacaagtggtgctgatacagaaaaatgaatctggatacaaatcttacatcttacacaaaattgaagtcgagatgattcatagacctacatgtaaaatgtaaaactataaagaaaatattttcaaaacatgtatctgataaagaatttatatgcaaaatatacaaagagatttaaaaactcaacagtaagcagataccactctccccctataaaggaaagaaatggacaaaagattcaaataggcacttcattgaagaggatatacagctggcaagtaagcatacaaaaacatactcaacagcttctttcattagggtgatgcaaataggtgtgtagtgagatactactacacacctattacagtggtgaaaatttaaaaaattgacaatgctaattgctggtgaggtggagtaacaggaactctcattcattgctgacagtaatacaaaatggtacaaccactttggaacacagtttagcagctttttaaaaagttaaacatagtcttatacaatccagatctatggttgctagggattcagagcagaagagggaaccgaaagttgaataaagcacagtgggggatggtggggtttaggatggtaaaactatgctatatgataatgaaatggtggatacgtgacactatgcatttatcaaaacctataaaattttacaacacaaagagtgaactataatgcgtgcaaatttttaaaaagtcatgtaggagagtggggtatcccgggatggaatgcagactgtgatgaatgtatgcatcagcgtcactgaacttaagggagcaaaggtgctgacctaagctgtggaaatgagtggagtctgtaagactaaaggcaaaaggaactgcacagaagaactgtactctagttggtaaagttgtttcccctggggatatgggttaacagttctgagacactgtacacgtatactggaattgaacaatagatggtggatggtgaggacagatttcttgctgttgaaatgggtggttagaaacaaacagtggagaaagctagaatatgtgggaatggactagagtttgagacatcagtatcaactcatgtttagcctactgtaggtacttttatttaatatcaatgaatatatacatagaaatatttttgatacatgtatttatatgaattaatatgcaaaaaatatttccttgctctggctgggtgtggtggctcacacctgttatcccagcacttttggagcccaaggtgggtggatcatgagatcaggagattgagaccatcctggctaacatggcgaaaacccgtctctactaaaaatacaacaaattatccaggcatggtggcatgtgcctatagtcccagctactcaggatgctgagacaggagaatcacttgaacccaggtggcagaggttgtagtgagccaagatcacaccactgcactccagcctgggtgacagggagattcagtcaaaaaaaaaaaaaacaaaacaaaacacttttcttgctctgtcagcaagagggcctggaagcaacaacactggagtagcaatgagcatgcccagcacccagttgatgatttttaaaatcattttcacacaaaaaggaattaaagcgtcttggaaaaatggtttattctaggactgaggcatgttgttgtgccataaagggagtgctcaaaacaaaatgtgaaaccccacaatttggggagtatgtcaaaaggacgtaaaagcaaacaaagaattcttagtggccaaagctggaacaatttgagtaacaaaataattattgaattattaccaaagtttaaatatccatgagtccatactcacagaaataaatgagtaaataaataaatggaataaagagaaagatcccatacagaaaaattctaactaatttgttgtgtaggttctctgccctctaggagattgaacctaactcactgttccttaaatgtggacttcacagagacacttccttcgaaagagttctatgtgaaaagggaagggagtgggcagtagctttacaatggagaaatatgacacacaccaccttagccgtgtgatcaaggtcagtgtcaacattgataaatcatttgatagtatgtactttcgatatgatgcaatgaaaatattactttgtatctgtgatcttcctccccgaaacccatcatctcagtcttaagtgaaaaacatcagacaaatctctattgagaaacttcataaaaaatacctgaatagtcctcctcaaaactgttaaggtcatgaaaaacaagggaaatcagaaaaactgtcacagccaaatggagcctgaggagacataatgactaaatgtaatgttgtatcctggatgggatgctgaaataaacacagaaagtaaaaactaagaaaatctgaaaaaagtattgactttagtgaataataaatgcaacaggattgcttcattaattatgacaactgtattatataagatgttaataggggaaattgggtatgggctatatgagaactctcagtactatcttcccagcttttatgtaaatcaaaatctattctaatataaaaagtttttatgctgacccatgaaacccttcttgatttacagacttacgagcaaaataaatgttttttatgccaaaaatacatacatatattttaatctagatggattttaaaaagaaatggatgaatactgctttaaaagaaatagaagatggaaagagtattcttaagtcaacaagaaattaatatagagataaagggatttaagagaaagtgagagttaggcaaagaggttctaacaaacttataataggaatctctgaggaagaaaacaatggaacaaaacaaaactgatagtactgataattactattcaagaaaatgttcttaaaagatgattagaaggtacctcgaggaagtgcactgaatgtttggaaaagtcaactctgaggggtcaaaacaaaatatgttctaataaactattacattttaaaggaaaaagtccttaagcattcaatcagagactcataatgaaagaaaattggatttcttgcctactttttgatgccaaaaccttatgtcagaatacaagtgaataacctaaaaaaataaaatgtgagcaacagcatttatatttagccttgctgacattcaagtgcagtgactgcagactacctattatgaacattcaagaacttaggcctcatggtgcccatggacactttctaaggagtctacaaagaacaagcttcaggctggatgcggtgactcacccatgtaatcccagcactttgggaggctgaggtaggcagatcacttcaggtcaagagttccagaccagcctggccaacctcgatgaaacctcgtctctaccaaaaataaaaaaaaaattagccaggtgtgatggcacacgcctgtagtcccagctactcaggctgaggctggagaatcacttgaacccaggaggtggaggttgaggtgagccaagattgtgccactgcactccagcctgggacagagtgagactgcatctcagaaaaaacaaaaacaacaagcttcatacaaccgaaagactggagagacattggtataggacagacacagtcaacacttccaaaaatcctagaagttggtgcggaaatgtgactgcgtctggaattctgtggaatgagagtagaagtgacatgcccttcatgaccctccatacttgtactctttccctatgttggctaaattgacagcactctaaggaggatgtagagctacaaagtagaaggatccagggcccctgctgacctgaatttggctgtgacatgaacaacaaatatacttttattgtttcaaaaataaagatgtaattaatcacattaacagaagaaataagaaaagtcatttcctcttctcagatactgaagaaagtatttaataaaattcaatactaatttgtgatttaaaagcattttacatattaagaataaaagggaaattctttacctaaaaaacctacagcaaacatcgaagttgatggtgaaatattgaaaacgtttctcctaacagaactagactcctgccgtcatagcttctattaaacactgtattggaaattctggttctggcaatgattcgaaaaataggaaaggaaggaagggagagaaaagggagggaaggagagagaggagccaaaaaaccacagaaccaaggaaaaagaatggatataaagattggaataaaacaaatttaagtgccattatttaaatgatggattacatgaaaaatataaaataatctacacataaactatcagaattcttttttaaattttaagttccggggtacgtgtgcggtatgtgcaggtttgttacataggtaaacgtgtgccatggtggcacattagattgtaaattgtgttgttaggtgcacaaaggctgcatgtatcaacccatcacctaagtattaagcccagcacacgttagctattcttcctaactatcagaattcttaagtagatttctaaggtcactggacacaaggtcaatacaccaaaaaaaaaaaaaaagacaatttctatataccaacaacaaacaattgggaaattaaaaaaaactatgtttacaatagcaccaaaaaataccaatgccgaccgggcgcggtggctcacgcctataatcccagcactttgggaagccgaggtgggcagatcacgaggtctggagatcgagaccatcctggccaagatggtgaaaccccatctctactagtaataaaaaattagctgggcgtggtggtgcgcacctgtagtcccagctactcgggaggctgaggcaggagaatcgcttgaacccaggaggcggaagttgcagtgagccaagattgtgccactgcattccagcctggtgacagagcgagactctatctcaaaataaatatatatatgtgtatatataccagtgcctaggaataagtctaatgaaagatgcacaggccttaacacagaaagacagacattactggaagaaattaaagatgagtcaaatatatggagtgctgcatggtgttcatgtattggaatacttaacattgcaaatatggcaactctctccaaattgatggatggattcagggcagtcctaatcaaaatgccagcagcttgttgttgtggaaattaagatgatgctaaaatttatataggaatgcaaatgaccaagaaaagcaaagacagtctagaagacccagatatagaaggatacttgatttttaacaaaggtggctctgtgaggccacctggaatggatggtctgtctaaaaaattgtgctagagtaattgggtaaccatatggaaaacttgttctgttgatccctactaatgccattcataaatcaattacaagtggattttagaaagataaagacacttctagaaaataacaatattttttggccgggagtgctggtttgtgcctgtaatctcagcacttagggaggctgaggtgagtggatcacctgaggtcaggagtttgagaccagcctgaccaacatggcgaaaccccatctctactaaaaatacaaaaattaggcaggtgtggtggcatgtgcctgtaatcccagctacttgggaggctgaggcaggagaatcgcttgaacccaagaggcggaggttgcagtgagccaagatcgcaccactgcaccctagtctgggcaacagagcaaggctccatctcaaaaaaataacagaatattttcgtggccttgaggtagttgatatttcataagcaaggcacagaagacgctaaagagaaaagatgatttggactacattaaaataaataattcgccaaaatacattattgaaagaacatgtcccagagtgggtgaagatattggcagtgcatataactgacaaaggacttattttagaattgagaagaactcctacaaatcaataagaaaaagacaaatgactcagtagaaaaatgggtgagagttttggacacttcgcaaaagaagatagagaagtggccaatgatcgtatgaaaagttgcttagtgtgtcattagtctttagggaaatatagaataaaaccacaatgacacataccacacactaattggaatggctaaaacttacaatatcaagtgttggtgatgaggtgaaacaactgcatttaccatatactgttacgggagttattgatacagttactctcgaatatgggcagtaccaatcagagctgaatgtacatgtaccttccactcttgggtacataccctacaaaaagacatacacaggaatgttcatatcagcactatttgtagtagccccagactggaaataagccaaatactcgttgacattagaataaatcaatagactgtggtgtattcatgtaatggaattgactggtagaaaaagaaaacaatgtgcaaaaaaaactgctgtctgtaaccacatggtaaatctcagaagcataatcggggacaaaaaccggacataaaagaatatatattacctgattccatttgtgtaaacttcaaaagcaggcaaaactaatctatggtgttaaaagccgaggtggtgttaagcaatggggagttgcgaatggagaggggcactaagggatttctggggcgtgtcatcagctgtttcttgatctgggtagaggtttcatggatctgttcagttggtgaacatgcttcaggctgtacaaatttgatttgtacatttttctgtacgtgttatacttcaaaaaatttattttaaaaagagactcaagagacagatataacaaccaaatttcatgcatggctctgacttgaagctgtgagaaaacccatacagatatgggacattgcaaactccacagagacagtggtctcagctgggaagtgatttttttcctaatcaatgttacaatgaagggacattgaaggaaatgccattattcaaggatctgctgcactttaaaatggttcagtaaataaaataaaacaaatgtagcaaaatgaaaataattgttgaatctaagtggtggatatagggatactcaaaatatatttatccttttctgtaagtttgaccattttcgtgactgaaaactttttaagatgcatatttaaaaaaaaagttttattttggcagaggaaaaaatctgaaagtcagatagttaaagaaatttaccattctgagatttgaatccaggactgttctgaatccaggtaccaggaaaagaaaacaaccttcaggagtcagaaggagattgagatattgcattatccaatttcctcctcttacagaagaggaaataggctagaaaggaatttgactttcatgaaattttaatgcggagtgcaacgtttaaagtttaagttgccttggtgtgttagctccgtttttccaaagaacagaaaaaccatgacgtttttagctctaacccagagttccatttactctttcattagatgtgaaacaaataattagattacatatttaaatgcatatgtgtggcaaatatattcttttaaattactgcaagagttattttgctcctagtagagaggaatcggcttctgttatgtgcgttatgttccttagaggtttagtgggttctagcctaagtatgcagagattcagagcatgaactttagagttaggataaacctggatttgaatctggataaatcttctcatttcacttaccagtcatgagattgcaggcaactttcttagcagctgcgagtaacatctgttaaatggggttaatcattgttcagtggagttaccttttaaagagagacctgtttgtagagttagcatggaggataaaaatagaatatattcaaaatgattgacaggtatagctcctagaaacaagacatgtagggccatgtatactgagaagtaccattgattactgaaattacactccatgaaatgcttatacagtgagcagcagatgaggactgtgagaccgaaggaagagcagattcacatccctcgtctcagggtcatttgcgggcacaggttcattgagaagaatggctgtaggatcttcggcacctcgaatttctcaccttctcttactccttcccccttaatttttgctgggtgcctatgctcaggttcacttacaagttaaatgcatgtacgccatgcctccattaacccactttatgaggctcttatgagattacctatatgaagtgcttcattttgagatcggcacagccatcactcagtgatttcagcactgctcctctccctcatcatcatcacggcccaagagtgatgaataaggagagagagagagagagagagagagagaagaatttatttgactaagtacgctttacatttttactcattggctttagtccatctcttaggtcaaacatcccatgccaaatacataccaaactggcattctttccctgttctcccatcagaagctgctgaagcatgcttcttctcatctgaaaaatgaacttaatagtcttttatgtctgataggaatgagggtgttgtcagaaagtatgtatgtgttaaagtactctaaaaagacatacagacaaaacaatgcgagttatcgttcttatttctatattactatccttagtgggtaagcccacattaatctgttgagagttgggcctcgctctttcccctcaatgtcttgaagatcaaaaaaactagattttagttttgttttattctttagattccatttttttggtagaatttggaaaaaaaaaatagctgaaggatcgacttctgcatttcaaagcataacaaggagaattgttgtgagcctgggtatatgtcagccaagttttgaatctcaaaatgcttatgtctccctctctctctctctgtctctgtctctctctcaatctgtgtgtgtgcgcacggcttctccaagatgtggaggtttggaataaaaatggtgattgacctttaacgagagagctgagagaactgcttctgtatattacatggctgtgcgctggattttaaatgtttgattaagttattagagtgttttgctttggcataatgtactataaattcatgatttctggccaaagcagttagtcagtggagaagaataaattattttgagaggtgcttcaaaaccaggattttattctcttggaaagacaaggctttaaataaatcacataatataaatgagaatttccataattaaggttctaactaggaagattcctaggagctttcagagcaggaaaatgaaggaagacattccagtatgctttaattctcatgttttaaaaaaatttgtattctgaatgttctatttcgttttagaggcgcagagaccaaaaagcaccaaacaagcatacatgaagtatatgttgttaaacactttgtctccaagatgtgagtgctgtagggggattgacatgttaaatgtattaaagcaagtccaggaaggctctggtgttgcattgcttccaacagtttgaggcccctgatgacggcacccgtgtcattacttagagaatttctccgggcagtcgtcactccttgtcacccagtaatttcattttctggcagcttttgtgttttcagagtatgttctcctgctttggtgactttagaaaatctctcttaaatggcagctcctcccctggggaggcctttttggcccttgacctcaggttctctccccaatattcttccagcagtttcctcaaagtcccacagtcgctcttcagcactgctaggtttttctcccaggagctcctaagtaaataaaatgcaattaaatatatgtgattggttcttgtactgttttatttatgtgatatatgtacacaccagagaactgtatactgtacagtgcacaaatgtaccatttataattgattcagtagggccatcatagtcatttctagaaaaaacatgccatcaggccttccgttgggaacctgggcacttacttagacatgtttctctaggatcaaataagataaagttggaagattgcagagtgcccccacctgtattgccaaaatgctgatattttagacatcatcttgaagatgaggagcacaggctaagacctcaggctccccctgcctgaatctcagctcctcctctgccagctgtgcagatttaggcaagtgccttcatctcctcatctgcgaaagggggtaatagaagtattaggttagtgcaaaggtaattgcagcttttgccattaaaaataatgagaaaggtctgggcgcggtggcacgtgcttgtaatcccagaactttgggaggccgaggtgggcggatcaccttgaggtcactttgagaccagcctggccaacacggtgaaaccctgcctctactaaaaatagaaaaattggctgggtgtggtggtgcgtgcctgtaatcccagctactggggaagctgagacaggagaatcacttgagcccaggagggggaggttgcagtaagccaagatcgtgccactgtattccagcctgggtgacagagtgagactttctaaaaaaacataataatgacaaaaccacacttatttttgcaccaacctaatacctacgctgagttgttgagaggactaattaagataacgcatgtaaggtgtctagcaaagtgcctgacacaaagtaagtccccataatatgcattaaccattaactatatcatcatcctgattatcagatttaagtggcgtaatttagtatataaatcttgtccaagaatgtaagcaagtgtaaattagaagacagactgttcagctattccctacctcatgcttaagtctgtgcctcccattcctatatatgccagtgcccactaggggtggccctgtctcctctgtgtcttccacccctcccacttatccattatcttgtagacctgtggttgcctggaacccgcccttttccatgttagtgggttccccagacacaaacacagtgtgggggctttagtgataggactgagggaggcagggccgaggggtgtgaagtatgcagacaaagtcactgtcagtctagccttagtatatatctcattgaggcatcccctttggtgcagatgttaaaatacccgcctccagtgtcccacattgtaaaacgtagaagtgaatctaggccacgattctagcaaaaaactgaaagtgaatcttacctgagtctttgagcctcctgagacccattgttaccacctctatagatagagacagagtaagagaagggactgaggataatatggggtaggggttttgattctggccttaacctcacccctagaatgcatgaataatgcttacatttattaaacacctactgtgtctcacactgtgcttggtgctttgtgtctactgtctgatttcattctctgagctagcctgcaaggtggggactattatcagcatttgacagatgaggaaacaatgtcggcgaaggcacccaatttgtttttagtcccgaagatcagagactgctacctgggaccaaagctcaggcccctcttagtgtgttctaggccttcagggactcttgttttgtgactggactgagtaggggggtagtggggatcaggccactttttgttcaatcctggaagtgggaagggtcaggggaagaaaaggggctgcagaggagtcgaaggtctcccaaaggtgtgcctcagcaggagactctctgacccagaagcccagccattcagctttgcccccctactcctctccccagtttcctgagagctctggtttctctccggctctgtgtctccagagtgcctgctgcccagctgtaagtggttagtgggcataaggatggggattccacatctgtatcgttacacccaggggctggcagagactaaagtggggtatggagggcagagatgggggagctgccttctacggttggcctttccctctccccttgcctgcttatccactgtgctgatctcatccgcgccattatcttctcttgctcaaaggactgcagacctcctctcttccctgtctgcttccactctggccccacagacaatgtactccacactagagcagccagagtgagcttcccaaacacagactatgcttaacacccttcctcagcttcccttggctcttagaaaccaaactttggttccctgccatggtgctcagggctcagtagcacctggcccctggcccctgcctccctctctagtgtcacctctgcttttccctctattgggaaatcaccccctgccgcccaccccctgtcttctcttttgtggcaactgccattcatttttcagctcaaaacagtcacttcctccgggaagccttccctgcccctcgggcgtggccccactccagtctcatacagtcttatggggcctttgttagtggtgttggcttggcatctctctctctccttagactataaggcctctaagagggaaaccacatatttgtgtggccaaagcacagtatcactggtacctagcatcgtgcctggccggaacccacacttggtgatgtttgctgtgagagtgagcagcgtcctgctttggaatcccagtcagagcactgagagaggggcagccagacctgggagctctgtgttgcccctgccattgtccttacatctccagttagagagattttgctgggttattcttcagcctgctcttttcccacccacttgcagtgggagtggtaaaaatctagaaaaacttccagtagttaccttgtggggccacacccctgtcccagtgatggacctgtctgtaaaacacttcttgtagagccttggcctctccctggttgtcatacaagacttgtcacatagtgggtgcttaggaaacatttgctgaattcccagcagccaattattttgagtatccttattagtaggaagtacttttctcttatgatgtaatttacataaaatatatagattttaagtgttacatattttaaagtgtgtatttaatttaaaaaatgggccaaacgtgggggctcattcctgcaatcccagcacttcgggaggccaagatgggcggatcacttgaggccaggagcttgagaccagcttggccaatatggtgaaaccccatgcctaaaaatacaaaaattagctgggcatggttgccggcacctgtagtcccagcttatcgggaggatgaagcatgagaacagcttgaaccctggaggcagaggctgcagtgagccaagatcgcaccactgcactccagcctgggcaacagagtgagtctgtctccaataaagaaagaataataataatttttaaaatgggcctggctgagtgcagtggctcatgtctgtaatcccaacactttgggaggctgaagtgggaagatcacttgagctcaggagttcaaaaccagtatggaccacatggtgagaccccatctctacaaaaatacaaaaggttagccacgtgtggtagtgcacgcttgtagtctcagctacttggaaagttgaggtgggaggatcacttgactccaggaggtcgaggctgcagtgaaccgtgattttgccactgcactccagactgagcaagacctagtctcaaaaaaaataaataaataaataaataataaaaaattttaaatggacaaaccatttggaaccaggtggaataaatacagtatgttggtaagctgggtgatctcctatcatagtaattttctatatgccatctaatttctgtagtgatatcctattgtatgcctgacaaatatgtatttcttgttttaattcttaccgttactctatggagtgcatattatcatcccattctaccagttaaaaaaaggacccagtgagcttaaatgagaccaaagtctcattgctgtgagaagtggaggcaagatttgaaagcagctctctttagcttcaaagctaatgatcttgccatttcctaatccgatgtatcttcttaagactacttagtaaaagacgagatatgattacaatgtcaaaagcctgtttcttttgtgtaccttgtacacagcctctagaggcagaaacaaaggtgaaggacccatttatcagccctccccattgcctgcagcctcctcctttccctccatgatattcctgcagatggtccggaagacagattcacaggcatttctacagaaacagatctctgagtcagcccttggaaaaaaaaagcaatctctttgctggttttgtttttcttggttgatttatttgacaaggacccattttgtacatcatttttggaatttcaaaatcttttttatctccaaaggtctctcctaaaaagctcaaggagaaataaaagacaggctatgtatatgactccagtgtgatgcttactgaagcctgagccctgcctttgcacttggttttctgaccctcagatcacccaggttgcagtatagaggcctgaacagagctaaatcccatcaggtaggagtcctgatttgcactaatccctaactgcacgtctctatcacttttgtttgacttggcaggacacctacgctgctaaacgccatagaggaagagcacatgaattattcactttctaacagaggttccttggtgagattaggtgttagaaccagccagcaaaaggaaaggtccccaactctggctggctgcagactgcagattcagtcactcgttctttacctagaggtcatagcatccccactccaaggctttctgcagagatgctaggctggtgttcctgggatcttggttttggcaacaagtcatttacagaggtatttctcatcccggcacatggtatgtcagatgctatcaaaacaggcactgagcttccctgggaattctctctggtttaacatgtgtttcagctgtgggaaaagcacaggaaaaaaaaatccggactgaatttacagttgcctttaataacccatgcagctaaatttattaggtcacagtgcccctttgaactgtggcatggaattttccatgtagcgtctagtttctccggtgagaagcagaccttcccattcggttttggccatctgtctccttgttgagtgaactcccatgtctcagccattttggttaacaaccaactttggtcaacggtgggctggggagatttcaccatggctcctggtgcttctctctgggtgacaatggctgaagtgctaacctgcattcatgtaatggctctgcatataccaacactgcatgaaaggactggatctggagacattcttcctaaagcaaaaattctgcattatgttttgcaagctaagctttcctgagtgctttgttgttttactaagagtaagttacggcatagcttgtcagttttcttagacccttctacttgaaccaaaaactgaggtgtttttttcagtagcttccaagtctcaaggcctagaaatcaaggaaataatttgcttagattagatcctgaactatcttttttttctttcatcacaatcctgacaagtaattgtcacctgagatctaatcaataatcaccaaattgatattgagcatgtactgtgtgtacgattctttactagcaatggtgggaaatataaagacacaatggagtctattgacttctgagtcattattttccttctacgtgccccaaggtgtagccagcatagtattttcatggatttttttggtgatgtatgttagatacacagcttttcaaatgcatgaccctacagatacttttgcttaggacaaagatatagcagacatttaagtaaaaatgaaacaggaattaattcacagaaatatattaaatcatacagataatacatagaaagaataacaaggtagtatgtgaatgattaaaaatctcaaaagccgccatcctaggtgtacttcaacacacatccccaaggacccaagtcagtttattattcaaggaggtaagccaagggcttttgagtatttgacaacacctggtcattaacttgcatggctcaaccacacagccaagccataatggacttttaatgaaattgttgtcctgtacatcctatgtatttcccggtgtcattaagatgtaaagcaatctctgtacatcctatgtatttcccagtatcattaagatgtaaagcaatctctgcaaccttgactgtctggatgaggcagagacatagtgggaagaaaggagcttctcagtgaagtgtgcacatcccactctgtgcattggcattggaagagggataccaagacgtgatgaaaggcagacacagcactaggaactgatggctggcgggggagtcagaggaggaacggagggcgaaggatgtctgaaggcaagtcacacaccacacatcacctgagaggagctggggtagtgaccacccacccttgcaacagaagcagtgaataaatcccaccctgcgcccctgggggagcctaacacccattcagatgtgtaatactgttgagtgcactgagtagactaacattgtcttggcatctctctggtgactaatctgtgggctccctgatttggttctgagttaagtggtctttatgttctaattctggtagccctcaacactgatacatcatgtccacgattctgcccagtgtattgacactcacataatgacagcctgttgaatgggaagaaacagtgcataaacaaaagagccggagccagagagaaagcacgaattttctgagccatatttgctctaatggaatcatgagattttcttctgttggtgtgagccaggatttcaaacctcaagtagatttgctcttgcactttgagctctaaaagagcttaagtttgattatacaaagaaatcagaaactagcacaaaggcaaaattgcctgatagagaaaatgggttctggaatcctgagccctcacaatgactgcagtgggaccctatgggttagggatctcaggggtgtcccaccctaagaaaaagcctgagggcacatcatggggcaaagcactttgtctcgagaaaccagatcagttgattaatacaaagagtgagagctggaaatgggagccaagtgaagggtcagatgccagaaggggctggtacagaagggagaagttggggggtagtaggattgtatagatcgagtgacctgaaggacactgtcccatgttggctgacacctgcaccaagctttgggagtagggttggtttgatgagccagtttggagcaggcatgtgagatgaccatatttctctcagcaagttcatgtatttttattgttactattgactacttttgaaattgaaagtagaagtacatattcatggtgcaaaactctcaaggattagaagataatataaaagataaatattcctgccttacccaatttctggttcccctttccaaatgtagctattgtcgtctgtcttttatatgcttccagaaattactcttatacaaacttatgagagagaatatatatgtgtgtgatctcatataccaatcagagccagccttatccatagttggagaagagaatcatttatttggtgtgattaaagaaactcaggaggtcccctagccaaaaaaatacacatccccaaggcctactgtagattgaatatttttcaaccatttgagaattttccttacattgatttttttaaaacctaaaaatttaagcttttttttttttttccatttggctaggatccatcttccagtttgtgaggaagagggcctgtttgcaagtgagttgattttagtatcttctctctgcctgaggatccccgccatgggaccagtggctatacagggcactgtggtgtccagagcaatgtggggtaccaaggacagggcaggaggtgaatgggaaagccatgagtcaggtggcttgcaagaatgagagtggtgctgggtctaaagaggggagccaggagacactgctggagaactgggggctgggacaggatccccatcattgggattggtcacctcgtgtgtgagtgagcagacgtgagctgaagacaccggcatgtagcagcgaatcacggtatccatgtctgattctgcatctgtgtctcacacatagaatgtcaagtcttgcccactggagacttttcgagatctcaaaaggctttgagagcaatgaaggaaaagccactcaaggaacactcagctatgatcatgttcctttgttgacagatgcctgtctttatacttgggtgataaactgcttctgcgatttcatcttttgaatttccatgtggctctatctcaggataggaatagacaccccggaatgtgtcaccactggcttctagctgaggctgagtaagatgagaagccctcccttgggcagggtcatgcatctgtgggtcgtggggtgagccccttgctgcattcctcagcagggcccacccctgccacctctgcacagctcagatagctccccacccaaacaggatggacagatagcaggtaggtgttggttgatgaaggcacagataaggtgagaggtgcattctgcacctgacagaagtcctgtttcagccacttaccagtagtgtgatgagttgtatgacacgtaacttcagttttccgagcttcagttttattgtctgtaaagcgagattaataatggtctgcaccttctaggcatgttgggggattaaattaattaaaacctacaatgtacttatagcactggcagaatgcattcgaggaaggttaggagttgctgctgttacactggaaccttattctgcctgtcagcagaggctgtggtctgtgctggaggtgggacagtcgtctcctgtggtcttttttcttctgataataaaccacccctgggcagggctggagctgcttcatgtgtgcctctgtcctgggggaatgtgtcctaaggcggcagcgctggtgtgtttgctgatctaatcaggagagagattcagggtccattctgttgtttacattggctctggacctaatcttgtctgtcttgaactgtaagtctaagaggatgggccagatctgatctggttcacatactgttgcaggattggagcctcccaacatttcagtgataaatcattgcagctggagaccgtggctgggttggtggcaacctcatcttaatgttaccagttgtatccctttttaaacatctcattacctaaagagtactcagttggaccagcattctgcattctgccttgaacactgagtttttaacaaccatgggtagcatgaattcagcaattaccagctgcaagctctgtgttaaccacatctatacgcatgatcttaagtaagactcagaactacccagtgagttagctctgtaagtctccccctttgcctagatgaagaaatggagttttaggggtgttaaatcactcgcctaaggtcacagagctagtgagtgcagaaccagagtttaggcaatctagctgcagagctctaaactctcaatcccttaatgttcccgccagtcacctggagatgtggttgtgattgacaggcagagtcagaatcagcagatctggggcatggcctgaggtgctgagtttctcacagactcctagaagatgctgatgctgctggtctctggcccatgttttgagtcacaaggctctcaactaggcagccacatagccttggctggctttgttatctagtttgttttgctgggtctaaggtgtgatatcatgcacaattgcctggcagccatccacttaccaattcatggcgaaggtgatatcttgtggctttcctgagataatgatgattaagcaaagatctgaagtgactcaaaagaatatggggacatttgaaggacatacagtaagcatgcagctggtacaaacagtccttggtagaaaggagcatggcctatgaaaatatcttcaaggaagtccaaaagcagacaccttcttctttcttcactactcggagacctccaaagcattttgcaacatgctctgcccatgttaggcactgaattaaatttcaagtttgggtgtgagacgaaaaggtctcgctttctgtgaaaggtcttgctttctgtgcaacctcacccatttcttcctcagaaatgtcttagctggacagccgggaaacagcagctgccattccatctctgttctgtgtgtttcagccagtgaggaatattgtctttttgtctcaatgatccttttttaccacatggttaatgacctcccacctctcggaattgtgggtatactttggaagagatgtggccataggtaggggttagaatcacagagcggcctgtgtgttgtattcatatgctcattgattcagcaattactggttcgttgcctactgcagcagacactggtgttgagcgtgcagtaaagaacccaggagataaatgcccctgacttccaggaacttgtgttgtaccaagggcccccaggaaccccaggctggatcagggccactagctcttcattagacctgtagagtgtttgtggcaatggtgtcatgttctcctggattactacaacattcaaatatgctccccaaacccagtcatccaacactggggtcccaatccctcagccacaaagtcgagccctgggattgccacgtacttcagctgtgagctcctgggacctaggcataatttgctctatattttccccaggaactctgccctgcttacaagtggagagtgtgtgaattcttgagagagtcattgtcttttaataagaagaaagaaagaattccttgtttacaccctgcttgctgtcttcacaccaatttattcacacccttggctcacaaaagaacttaaagtttagctccccaaggctgggggaagggtagaaagtctaagttttttttttttttttttttttaacctactcaaggtcttgtccaaacgagttgtcaccgaaaaatgaaagccagatgttattttagtgaggaataaatatgtggccaagctgtggattgaacctgaggtctccccggatggtttccatgtgtgttggtagctggactcccaggtatcagtggctcacattctttctcttgtcttttaactgaagtacggcacacacagatggctaatgagcaattaacatccgagccacgcatctccccgtagcaatacctatcggctcataagtcggtttcaaaccagcactgctgcgggctgctgaatttgggatgacagacatataaagacccacatccggaaaagagagaaaagacaaactcaggctgaaagtgctgcctccagcttctcaatgagttatttgcttttgttgggagccctcacatcctcacaggtagcatacctcagataaccatcgaggaattacagatgaaatcagggctcagggcaaagagtggccctttggggtttaacattacagcacgttcttccccaagtctgattcaatggtgagcttttcagccaaagaaagtgttttcggtaattggccaaatctctataggaagactgctgaacttgctactgtttctatcagagcctttctcatctcttggatttttctcacacttttcaagttctagatataatccattgtgcattaatctttgaaacgtgtcaggtgggtattagaacttccttggaggccagaaaaatggtgagagaagggaaaagggacggaatggagctcaaagggtcactggggcccagagcagagatgaatccattggacacaggaaagcagtgtcagacctggagatggtggataagggaattagagagttaggtgagcaggtgatctgcactagccacctgacccctggctggtggcacagtgtgtgagctgatcagggcaggtgggaggcatggattcaggccagtcatgacaactttggcagaaggaggccaacccaggggctggattccaggcactgagtgagggtctctaggaaaagaggaattggccaagggcaaggcacagccctgtctttaagaaacccctctaagatttcttcctatgtaaattagggataataataggcatgaactctcataataggtttgaactatcataggttattttgagcatgaaataaattaatcaatgtaaaatgtttaaaagagtggtactccataaatattatgatgatgataaagggctttagacatgagggaacaagaaaagacaattcctaaaataggaatttcattctaggaaagaagtttttcaaacaaggttagcacttggcctttgaaatgtatcatttatttattcaaatatttattcaatctttccttctttattcaggaaatctttaggagctcctttgatgtacaaagcattctgatcgggccagggagatgggcaggggatggcaagcagcagccatgggccaaatttggcccactgcctgcttttataaataaagttttattggaactcagccacactcatttattgatgtattgtttatggttgcttttgcactccttcagcagaattgagtaatgttgacagacaccatggagcctacaaagcccagagtaattactgtttggctctttacagaaagggtttcctagccttcattcactctgtgatgaaagaaacaaataaatagaaaattatagtaaaataatgacagaggactctgggagtagacaggaggatcagacagacttcctagaatggatgccctctcagctgagacctagaggctgaactggagttaataaagtagaggagaaggaaaaagtattccagatagaacaacatcagcaaaggcccagaggtgagagagtgcgagttacgttcaagaactaaaggaagttcgtcatggctggggggcagaggacagatgacacaaagctttccaggtaggattaaaacatttcgatgatttcctgagggcaatggggagctactgaaggatttccagcaggaaaacaacataattaagtttgtattatagggagatcattctttctgcaataaaggtggatttaaggcttaagtggaagggtgaggagcgagactggaggcaaggaggtgcccctttcagtaatgcggagggaagatggcagcctggaccaggggaacggccatacagttaggagaaggggattgtttggagacatatttaaagatgcatacctcatggcatacagcgattgattgcacatcatgagtgtcaagtgaaaaggagggaagcatgagcccttgctcagagctattctctgagatggggaccaggttggggatggaaggagatgacagtgtccatggtgaacatgcctttgggatacccacaggagatgtcacgttggattcattgcagagcagcatatccctttcactttactcttgaagacaattagggagtctccgttaaatgttgggtaatacccaggttcagtatactggtgttaaagaactccacccacttccaccaccaccatcccctctacccaccttttcacacacggatttgccgcacctcccctttgggaactttatttgcctctccagagggccctcccagtcaccctggcctcctcccagtttcccagacaagccttggttgttgccacttcctcactgcggttcctgggttttcctctgcctcttttctctttccacatcccaattcccctttaaggcccttgtgggagctgttataattactgcctcacacagtgctttctcctgagccctgacttctgctgcctgctgccttagagcaaactctgcatgggacatcttctttcccccttgatgggctctccatgaagcgggtgttgtcaacttacttggaaccagatattgagcacttattttatatcaggcagaatacagagccacttatatgatttcaattaattcttacaactcccttgggaaggaggtgtttgtcttctttccatttaacagatgagaagactgagacttgatgagtttagtcaattgttctgagtagtaaatgacagactctcccaatgctcatggcttagctctcaccaccaagtggatgatgcctgctgtctctttgaacttgacctattacttgccatcttggtaccttcgtttggccactcttactttattccacacctctttctccttccaagcttctgagtctgtcaaagccatcactattatgcacatttttctagaacagaagcctggctatttctttgattcatttatttaacaaatatttattgtgtcatgtgccaggcactgttcttagttctggggatatagtaggaagagaaaaaagtttttacccacatggaatttatattctagtgggagaccatagacagtaaacaaaacaagtaaaatgtgtaataggtcagatcatcacttggaaaaaattaagcaggggagtgagtcagagagctcaggaatggagttgcagttttaatgggatggtcaaggaagatctcctggaggaagggatatttgaagagagatctgaagaaagtgaagatgtcagctctagtttgaagtcagatagcatgatgcctccagctttgttctttttgcttaggattgtcttggctatgcaggctcttttttggttctatatgaagtttaaagtagttttttccaattctgtgaagaaagccaatggcagcttgatagggatagcattgaatctataaattactttctcctatccatgagcatggatgtttttttcttttatttgtgtcctcttattttcttgagcagtggtttctggttctccttgaagagggccttcacaacccttgtaagttgtattcctaggtattttttttctcttagtagcaattgtgagtgggagttcactcatgatttggctctctctttgtctgttattggtgtataggaatgcttgtgatttttgcacattgattttgtatcctgagactttactgaagttgcttcagcttaaggagatattgggctgagatggtgaagttttctaaatatacaatcatgtcatctgcaaacagaggctacagtaaccaaaacagatatatagaccaatggaacagaacagaggcctcagaaataactccacacatatacaaacatctgagctttgacaaacctaacaaagacaagcaatggggaaatgattccctatttaataaatggtgttaggaaaactggctagccatatgcagaaaactgaaactggacgccttccttataccttagacaaaaattaagatggattaaagacttaagcaaaaattaagatggattaaagacttaaacattagacctaaaaccataaaaaccctgcaagaaaacttaggcaatatgattcaggacataggcatgggcaaagacttcatgtctaaaacaccatgtctaaagcaatggcaacaaaagccaaaattgacaaatgggatctaattaaactaaagagcttctgcacagcaaaagaaactatcagagtgaacaggcaacctacagaatgggagaaaatttttgcaatatatccatctgacaaagggctaatatccagaatctacaaagaacttaaatttacaagaaaaaaaaacatacaaccccaacaaaaagtgggcaaaggatatgaacagacgcttctcaaaagaagacatttatgcagccaacaaacatgaaaaaaagctcatcatcactggtcatttagagaaatgcaaataaaaaccacagtgagataccatctcatgccagttagaatggtgatcattaaaaagtcaggaaacaacaggtgctggagaggatgtggagaaataagaacacttacactgttggggggagtgtaaattagttccaccattgtggaagacagtgtggtgactcctcaaggatctagaactagaaataccatttgacccagcaatcccattactgggtatatacccaaaggattataaatcattctactataaagacacatgcacatgtatgtttattgcagcactattcacaatagcaaagacttggccccaacccaaatatccatcaatgatacactggataaagaaaatacaccatggaatactatgcagccataaaaaaggatgagttgatgtcttttgcaggaatatggatgaagctggaaaccatctcagcaaactaacataagaacagaaaaccaaacaccacatgttctcactcataaatgggagttgaacaatgagaacacatggacacagggaggggaacatcacacacgggccgtctggggacggggggctaggggagggatagcattaggagaagtacctagtgtaggtgacagttcaatgggtgcgggaaccccccaaggcacgtgtatacctatgtaacaaaactgcacattctgcacatgtaccccagaatgtaaagtataataataaaaatatgccagctacttagacatgttttctaggaataaaaaaggaagaggcccaaaggaaggtgcaccctaatgtgttccaggagtagcaggtaaagccacatggctggagtagagtgagagagtaggagagtggtaggaggtgaattttgaggggtaacgggatagggagatggacagatcatgtagggatatatggcccattgtaagcacttagacttttactctgagtgatgtgggagcaactgaggggcttttgagcaaaggaattacctgattaacatgggttttaaaacgttcactctagctgctcatggaaaataggatgtaggagcaaaagcagaaacaggggaaccagtcatgagaccccaatccctcctcctctgcattactcagttttcctttctagccagacaacctcagaatctcagcggcttacaaaaataagcatttattttctttgtatatgggtcatgggttggctgggtttggctgtttcagatggtcttagctgggctcagttgggtttggattcaggctgtgatttgggttcaggaatatccttgtgacttctccttctatttgggttcttggctatcaaaggcatattttttgatggcaaatgaaataagagatgagatcaagccaagtcactcaagcacatttaaaatctctgctcacatcacactcacaccaaccttctgttaaccaaatcaagttacatggccacacccaacatcaatggaacatggaaatatatacttcccactttaatggaagatactgcaaaatcacacggccaaacccttgggtgtataattctactagtgtgcggaagaattggaaacaatgaaccagtttccacgccctgtctctattctaactgtcttcatcccatttgccactaagttttgccttgtctcctgtttctcctcttactttgattcattcattcctacctctggtcccctttgactcacacaacggtctttgtcatgttcaactccagtttcacccccaccacccaacacattctgcataccactgcccaagttctcttcctactaactgactttcttcatgccagtccttcccaggaaacttcagtgaccagctgctgagcaacacatcattttccaagtgccagtacattctataccttcttcatggtttttgtcaattcatgcaacacctttactcaaattattttctttaatttgactttaagtcaacttcctttctttttccttggcctctctttaataatgaccatgagagagttacgcatttttgtaaaaacataaaaaatataatgcaagtaaatttttttgtgcatttatttgccctctgaaatcttgagagattggacaactgcattttggaacccgctggcttcccacaaggccccataccttcatcctacctgtctggccttacctctcatttctctctatgtccgttgcctgggtcatgatgcacccctcactgtggactgccctgggtagctatctgccatagcgatttctcccacagcttctgtgttttgtggcacacatcacatgttcacacggggcttatcttgcttatcttattctgctgctagattgcaagttccttaaggaggaggtcttactgaattttgtatctcagagtatgatgcagaataggcacttagtagacattgaattttataatttttttttattatactttaagttctggtatacatgtgcagaacgtgcaggtttgttacataggtatacgtgtgccatagtggtttgctgcaccccgtcaaaccatcttctacattgggtatttctcttaatgctatccctccccttgccccctacccccgacagatcctggtgtgtgaggttccccttgctatgtccatgtgttctcgttgttcaactcccaattatgagtgagaacatgtggtgtttggttttctgttcctgggttagcttgctgagaatgatggtttccagcttcatccatgtccctgcaaaggatgtgaactaatccttttctatggctgcatagtattccacatgtggcatatatgccaccttttctttatccagtgtaccattgatgggcatttgggttggttccaagtctttgctattgtgaatagtgctgcaataaacatacatgtgcatgtgtctttatagttgaatgatttataattctttgggtgtatactcagtaatgggattgctaagtgaaatctggttctagatccttgaggaatcgccacattgtcttccacaatggtggaactaatttacactcccaccaacgtgtaaaagtgttcctatttctccatatcctttttagcatctatggtttcctgactttttagtgatcgccattctaagtgatgtgagatggtatctcattgtggttttgatttgcatttctctaatgaccagtgatgatgagctttttttcatatgtttgttggctgcataaatgtcttcttttgagaagtatctgtccatatccttcgcctactttttgatggggttgtatgttttcttcttgtaaatttaagttctttgtagattctgaatattagccctttgtcagatggatagattgtaaacattttctcccattctgtaagttgcctgttcactctgatgatagtttcttttgctcttcagaagcactttagtttaattagatcccatttgtcaattttggcttttattgccattgcttttggtgttttagacattaactctttgcccatgcctatctcctgaattgtattgcctaggttttcttgtagggtttttatggttttagggctaacacttaagtctttaatccatcttaatttttaagtctttaatccatcttaatttttgtctaaggtataaggaaggggtccagtttcagttttctgcatatgactagccagttttcccaataccacttattaaatagggaatcatttccccattgcttgtttttgttaggtttgtcaacgttcagatggttgtagatgtgtggagttatttctgaggcctctgttctgttccattggtctatatatctgttttggtaccagtaccatgctgttttggttactgtagcctattagtgtagtttgaagtcaggtagcatgatgcctccagctttgttctctttgcttgggattttcttggctatacaggctcttttttgcgttccatatgaaatttaaagtagtgaactcccattcacaattgcaaccaagtgaataaaatatctaggaataccactaacaaggaatgtgaaggacctctgcaaggagaactacaaaccactgctcaaggaaataagaaaggatacaaataggaaaacattccatgctcatggataggaagaatcagtattgtgaaaatggccctactgccaaagtaataatatgtagattcaatgctattcccatcaagctacccaatgactttcttcacagaatatgaatttcttaatttataagtaagcaactggaattttgatgtttcaaaacactactatgaattctttgaggcagatctttccttttcttttttttcttccctgtttgcccccaggtaagcaaacagtaggtgcttgttaaatttgacataagaattgtgtagtcttagtccattccagctgctataacaaaatagcatactctgggtggcttataaataaataaggggaagtccaagatcaaggaaggtgccagtatacttggtgtctggtgaggacccactttctggtcatagatggcgccttctagcttatgtgctcacattgtggaagatgcaaggaagcactaatcccattcatgagggctccaccctcatggcccagtcaccgcccaaaggtcccacctccaaatgccatcatctcagtggttgaattttgaatgtgaattttagtgggggaaggacagaaacatttggaccatagcacaggggaacacaagaaggcagctaagatggataatgaacagtgatgataattcaggtcatttagccgttcttagttcttttaagcctaagctgagtttgaacatcaaacacatcatgattttggttattgaaggcacaagagtgtgaatgtggagccctttgccttcatccacaattgaaaatatgttatttgtgttaggtaactacctctgttcatcctatactggctctaacttggagatgacgttgaattcttttcaggatggacttggtgccgtgtgtgtgtgtgtgtgtgtgtgtgtgtgtgtgtgtgtgtgtgtgtatgtatgtgtatgtaaaacagagaaagatagtggtccagaggccaacacacctggaatctatttgtgagggtccctgcttcagtccacgaattgggccattcatttatttctcagtaagtgaacatctgggattcagtttgaaacgccaataagtttggatgggatcgcaaagctgtggttgggatgtggaactgctcgcctgaggtgggagtgagcgaggtgagcgggggctcttaaactatttctgcagacttcagttcaaatgcaatagccagagggttgagaaatccttcccgtgctggaaaagcattaaaaaaaaaaaaagaataaggaaaagattcaatcagatcgaagtgacaatgcaatctgaaaagtgcccctttcccccttttacccagctccctttccatcctacagttctcatattatccaggtatcttccttttctagcaaaagaaaaaaaataacaaaaaaaccttggacctgaatcgggaagaaatgctatgagaaaataaaaattctaattagttatagatgagaattggtcacagataattattctacgttctttggcttatgccagaaaaggcttaaaagaactttttttgttgttgctgtatatgtaaatgtagatgtaaatgcctagataaacacacagagaggcacaccatcattaagagatcttgcagattttgagtgtttagaacaaaaatgaaagagaaatttgtcattcacaaactaggaatgtttgaatcgtttactgtcaggactttgtcactttgaactaactcaaaacaaaagaaaaggccaatgggttcaaacaggatcattttaaacagtacacttccagaaaatttgtgctgagttgtacctgccctccctgatatctactagctagagtatttctatttcaatttgcatctggcagtttcctacctgtgagtcgaaggggttggagacctagatgaaaggcctagaataacccagagagaacatggagaatctgtggtgggctgtgctcatgccatctgatttagaaccagctttgctgcattgttttgggggtcttaaaaggggaaaaaatcctaatagctgcctgaagtatttttctcttaattcctcatagaaatgagtagatattaaccacaggctgcccaaggcatgcttaatgtcttgatggagcgtgcttttgcagagtgttgctaacgcattctcagtccctcttccctgcccccaacatagccctgccatatttattcccaggcagcatggaaaaagagaaagttagcttttgggggcaatctgctttttccttttattaattgcacccctcactcttctcatatagaaaccttatgtggatgtcccacctggtgtaagaatgcttgccctgactctggcttcactctgttctgaagctgcctctgcttctctcaccctactgcacagaactgctggcatgagcctcttgctccaagctctcaggaccctctttcaagcagtatgggtcaaagtgtttgatttgtgctactgtgattgtgactgttcagtaacctggttgcgatactctggaaggtgcctaatgaaatactctagttttaacagctgaagtgaaatagccagcacagggggcttgggcagcagcacgcaacttatagcactttcagttcttcacaaagtttgccccctttggctcatctgttcctcagtaattctgttagataagtggagtagatattcactcatttagtcattcaaccaaccaatgaaccaaccaaccgatgaaccaaccaactaaccaacaagtatttattgagcacctactagttgccaggctcaagtggcagtgaacaaaacagacaaaaatcttctcatggcactacacatttgaatggatatcctagtaggtatcattatgcccattttcacatgaagaaaccaaggcatagggagattaaatcctaaggccatgcagtacattaaaattcaaatattctctccagctctcagaataaggagaatagaataggtcatcttaggactcatctcatccaacccactgattctgttgatggaggaaaccagggctgtggtttacatggagttgcatagctctagggcagagctagaattatatagcacagccttcctaagccccagcgccatgccctgtccaagagttcttagaccctgcagaggcatataattcatagactttgtcgtttgtcaccattcctcacccgcttaatgaggccccctccctcattactcagcatagatttcatggctcattttcataattgctctcagcacattccctcaattcctgggcccctctcttcctccatcatagttgcctggaaacgccctaaccttggctgaattcagccttctattgtttgcaccctctcacccaggggacttgaatgttgctgaagaaacacacacacttctgtggacgaatctcacttacagctcatgaccactaacctcaaatgggcattggctgccgcccggcaaccctccagcctttcctaagcagcgatgtctcacctttccttctcagtcatcatacctcctcatctctccctggcctctgctgagaatctggctttgtttttcactgaggaaacagaagtggtcagaagagaccctccacagacacccaccaccacatctgccaccccccgtcccctgacttctgccttcccgctgttgccacaggtgacccgtctctggccctgccaaaggccactgccatccctttgcactgggattacctctgttgcctgttcaggagcttcactctaaaatttttctcctctctcccctgaatcatcaatgtgcctcgctcctatgtcattcttatcagcactgaagcatgtcacgatttcctccatcttaaacaataaaacccgacttgaccacattctctcctagctatcaacccgttttctctcctcctttattttggacgtctcaacatcattgttcctttttattttcccccactcttttttgaaccactcctgctaataggtcatgcccatctttggaccaagcaactctttgcagggtcaccagtgggctcttcattgcccaacccaatgttatcctcatctttctctgtgtctcagcagaagttggctaaccagttcctccctccctccctatctccctcctttcttgaaactctcccttcacttggccttcacaactatgctctctcttgcttctcccccaccacactgggggctgtttcctcctctctctggctcgtgtagcccagaactcagtccacactcctcttgccttgtcttcatctcccacggtaaccacatccaagttcatggctttaaattaccacctacatctctctatcttggtcttatccctgagtgccccatatgtgtatatccaatcatctgttgggcatctataattgggaatatttgtaggcatatcaaatttaacatatccaaatctgcccccaaccccctgctctacccacagtcttcccccatcttggctaacagtagttccaaagttttagatgcacaggccaaaatatcagcctcatccttgactccccttttctctcttgccttgcctccaatccatcagcaaatcctgtctgctctaccctcaaattatttatagaatttgactacttcttaacacctctgcggctgttatcctggtagcagggtaaagagcattcccagagaagggaagagcatgtgcaaaaactctgatccggggaaagctgcaagagtagaaaatctcaaaagagatccaggagtgattcttgaatctggggagttgtctgctttcttggccgcattgtgagatgtcatggggaagaggtcactatagggatgcagctttggtgattgccaagtggtctgactgcctgaaatggatctggccagctctgaagttataaatgactattaacttgcatgtacattattatctgctgtgtgtgtgtgtgtgtgtgtgtgtgtgtgtgtgtgtgcacattcacatgcacgcataaatatgtgctttcttccaccctagatatgttttcttggagtctgagccctagtgtactaatatatacccttgtacaatcttctggggctccccagagacccatgcccttgactttagtcctagataaagcaacctattggctacggcctctggggttcccctgcattgttctgggcaaaatttacttaggcctgtgagtcagccatcctggaactagaggactcacagtgccttttggcccattctctgcagaaccagtgattttccacctctgtgtagacaggactcttgtccatcttctccctcacccccttcgtttctcctgaaatcaagatcttctggatgcaggggcatttgtgggcatcaggggcatatgggagtagccagggcaggggtcagaggcaaggcaggctcaggccattatgtactctacatttccctaacagccatgtcattggagaaaaagtaatccaatgtgaggtacaggaaaggtcaaaagagattgtttggtatgtgtgtgttgcgggcaggggtggggtgggggggctttgtgcttgttttcttttcatacttgagtcctgagctggatctcagtaggatgtgatcctgaccaagctcccagagttctctataaccacataaatagggcaaggatttcctgagactctcatagccttcttctgaaaccagagaggcatggccggcaaatattccttgtttctatcctccctgctgggattattgggcatccttctgtcaaccaaggctccaaaaagttagagaagcagaatggcaagggggttaaaatcacaggttttagtgtccaagagacctctgttcaagccttaagtttgggctgtgtggttttggaaaagctacataaccttgctgtgcctcagtttccttatcttaatgactgtaacagtgtctgcttcaagagtttctttaaggacgaagtgagataatacagataaaacacctaacacaacacttagctcatagtagtaagtgccctatgtgaacataaaaaaggaaggaaggatggatagatggacaaggacagagatttttattttattttattttatttatttatttttgaaataggctcttgttctgttgcataggctggagtgcagtgggatgatcttggctcactgcaacctccacctcccaagcttaagcaatcctcccacccagcctcctgagtagctgtgactataggtgtgtggcaccatgctcagctaattctttggattttttgtagagatgaggtttcactatatttcccaggctgctctcaaacttctggactcaagcaatcctcctgctttggcctcccaaagtgccaggactgtaggcatgagacactgcacctggctgacaaagagatctgtgctgttttgatgcttaaggcatactggtggttaagatagtcctcaacaaaatatccaagtgttcctgtagatttcccagcttcctttgcagctaggtttgtgccatgtgactagttctggccaatcatgtgagaagtggtatgagtcactgctgggtcaagggagttaagagctgatgtacttcctccttccttctcttcccctggcacagcagccttggaggccacatgttctctaaggtatcataccatatggaacaaaccctttatgtgagtgtggaataagtgtttattgtgttaacccactgagattttggagttcatttgttattgccttgctgactgatatagtcatctatgaaggagaaataaatctcctgaatttccaacctcttgggacatctagggacaattatactgataataacagtagctgtaacagctaccacttattgagcccttgagaaacattgcaaagccctttacagatgttaaaccattcagccctctcagatatcccatgaggtacatgttttgctattacataataattgtgttcctaaaataatctttaggttattttttaaaagggttcttgcaaacatcttcagtgagggtaaaaaaaactgcttagggatcagaattttaaagtatgaccacaaacttctttctcctatagaaatgtcaaaaataaaggggtttttaattgctattaggactttcagaacttacaaactaaaaaataactgatttcaaaactgatgtaagccagcctaaatgtcattgatcaaatactgaataccatggaagacaaatctcaggtcaacttgcagctaagccatcaaaataaattgtgggttggtccacacttactataaggaagctccattatatctcaatgaagctgcttgtccctccaaaaaagggaagcctcaaaggcaaagaatagcatcattcaactaaaatggccctgggtattgagtctgtaagccattagactttcctgccccacatatggggaccattcctgatcatgacactggtataaaccaacaaccatcacaaattagcttccttgctgaattgctcagattacatccagtttgcattatgaaaatttgcatagcaggaaaaaaaaagcctgaattggctgttagacaggtgaggaaaccaaggaagtaagaggccttcagtgactacagtaaacaactagtgggaacagccccagatcaaggatctctactcttttgactctccagagttcaagttttttgcccccgatttatagtgacatctgtacatcttcatagttgatgatgtcatctctgaactgatgtttgaggcctgtgaagtttggttctgcccttgcccggagtctgtagtcatcatccctggcgcttgctggcctggagcagcagctggcaggaagcattgtccctctccctctctccattgggggtgacttggagcttttgcactagataacaaagctgcttgggttcttgttgttgagacatgtgagtgtttctgaaagtaccagtagacggagaaagaattcaggctgcctaagaagctgcctggggaaggggaaacaattgagttcattactaaagcaagcagtcctggtgacctgtaggggttagcacactttgactttcttcctccctcgggcctgattgggcagctgacagcccacagctccctgaggaaaggaggggatttgatgtgcagtgggccatgcccaggccctagtggcccctcaccccttccctttcctgagggaggggaagtagtgaccccttcgccctgctcaccttgcttgtcagtgaggttgatacctctgaaagctgagtctctaagaagtttctgaatgatgaagacagactcaggtaggcaggccctctgggagccctgtttaccctcacacagtgtgacttcccggatcagcagggctattgattcatcaggctcccctagctggcctttcctaccttttgatttattcatgaaattcagcaggcccttctggaaggttctttgtgtgcctgatgctgtgttggctactgttgggacgcaaaggactttttagttgtatttcccacccttagtccttgaaacttagatgataagacagtttataatgaagggctaaattaagaattctcactacacatagtaggtaagagcacaggcttagcagcaggcacctgggttcaagtcccaccaactatcacgttggtcaagcttgactttgggcaagttcttaaccttcttaggccagtatttcctaaatatagggatgctaagagcactggcctccaaacgtttccatggagattaaatgaggtagtgcatgtaaagtgctcagtacaatgcctggctcatggttttagtattattactaactactgctattagctgtcaaaacatatttgagagatttcagcattgcagaaatcctgaatctaaacacaccaccttccgcacagtgttcctcccttctctattcctctcattagggattggtaatttgactgatcagttaccccacctggagcgacttttcatacccgcactcctgtaactccctgaatcctcacgtacatcctgtcacaaaacccagccgattatacctcacttctctctcctacacttcagccacactgttatccttaaccaggtcttcacgcagagaccaatcctcacgtacatcctgtcacaaaacccagccgattatacctcacctctctctcctacacttcagctgcactgttatccttaattaggtcttcatgcagagacactagttacccaagaacacttttaactggttttcctgcttccgatttcaacctcctccaaactgggcttactgctactcaggagacatgtgtatatgtatgtatgtgtgtgtgtgtgtgtgtgtatttatatatatatatataaatatacacacatatgtgtgtgtgtgtgtgtgtgtgtatagtttgtttgtttgttttttgagttggagtcttgctctgttgcccaggctggcttgcagtggtgtgatctcagctcaccacaacctctgcctcctgggttcaagtgattctcctgcctaagcctcccgagtagcggggattacagatgtgcatccccatgccaagctaatttttatatttttagtagagacggggtttcaccatgttggccaggctggtctcgagctcctgacctcgtgatctgcccaccttggcctcccaaagtgctgggattacaggcatgagccaccacgcccggccaggagaactttttaaaattcaaaccagattatcactcccttgctcaaaccctttctctggctccctcttactatctgtaaaaagccaaacccaaattctttattatggataaaaaggccctttgtggtatgactgctgcctagttgtacaccttcatcacttgtgttcgcaggtcacctctgtgttctagcagtgcaagcctgcttcccaaatgctcctgtctcctggccctccatggagtacagagcacatactgctctctcagtctagaagtctccacctctgtctcctaaagagttctagtcatcctttaaaactaaactcaaaaccatcttccttgggaagccttcttttaacaaggactgggttagctgctgctccattgtgttcccacgacaccttcgctttcaagaacatggcaattttttgttttcaggtctgtcttcttcactagcatatgacatttttaaaagaaggggctgtatcttattcatttttgtatgttcatattgaaaaactggagaaatgaaagaatggatggatgggtaaatggtggttggacggatgagtgaatgcttgggtagatgggttggttgatgcatagatggatggtggttggatgtacagataaatgaacagttggatggatgaatggttgaatggatacatggatgggttcgatgaagtggcaaaaacttctatttatatcttacacccaggtacatctagaaaggcctttagtggttccacaaagacaagggcctatttcttagtgcttctcaattcaggctgaaaagcagtatggctttgcaactcagcagccagttggttttttttttacctttatgctccccattgttgcatcaggaaagctgaggagttttgatcttagtgggagagggaatacctaggaaggccttatcctgtcattgccctggcccacatctcatttgctgacttcctcagttctgtcctcatatgagttccattcagtcctgttctccattcagtaatcatggatttacttccagcttgaactatggcaggagatctccacctctggacccagagtaacagaacagcagatggcatgagtgtaccatggccaatagccactgtctgcacccggcacttacctgtttatcaggagaacagcatgtctcattctgttcattttcctgttgaggggctgctttcacagaagccacatgggaagtgtaccttatgcagcttggagccttcatcatcttttcaaggaagactttccaggcccatatttactcagtaaatatgagtaaatcctggagttacctggaaatacagtatctagctccttctgatattgagaaccagcaggcgacctgctcgagcttaagtggaaaggtcccaaggcttttgggagcagagccccacccatctgtcccagaatcctcattcagggtttatgaagcagtgggcagcacacaattggctaaatttagttatatttttatttttgtccagccacaaataccggcaaaaaactgaaaatgattccttcccttccaggagccttggagccaagctggttttatttttagcttcaactctggtttagggttttcagcaaaccgaacaccctactcactgaagacagcagcaagctgggttttaggatttttgcctggaatggagtgttggttctctgaatataactcttaaaagactttgtacagttgtgacaatagagggtggttccagacagacccacatagagactcagttcttgccttagggacctccaagagagttcctttccagggaaggcaatgtacacagggtggttcattgccttggatgggttggaggaagtggcaactctggatgaaaagaaacagaaaaattaagaaagggaaagggagagggagctgttgtttattgaaaggctttgagtagcatggtggttcagaactagagctctggagtctgaccgactgggtgcaaatcctgccactaccacttcctgacattgtggccttggggatggcttgacctccccaggcttcaggttcattctgtatgagacaggattaataatgacacctaccatgagcactgctgcagttatgatcctgcctgtgtagcacgtggcatggcgtttgacatgcatgtagaactcaatccataccattatcatcactgttgtcatgctcttattgcagtgctgaacgcttgcgtagacactgtgtcatttaagactcactgtaacccattttgcagatctgaaactgaggtccaaagggctagatagcttgcttcagatcccacagcaagagcacaatatagccagacctgtgcccagccccggtgaatcccacatacatcacatcaagccttctccagttccaacggcttccacctgttatcgctgagtacatgggaactactcaaaacataaaaatagatgttgcctcatcctcctcttcctggagtccccctctttttttttttctactttagtgatgggaacacacaaaaagcagatactggcagtggtcaaagagcaccaggcaaaatcagagacagacagtggaacggtgattgccaggggctgggagaaggagggatggggagttgttgttcaacagggacagaatttcggttttgcaagatgaaaaagttctggagattagttgttcaatgatgtgaatatactcaacgctactgaactaactacacttttagtgtacagtttttttattgctaagaagataaatctcatgatatgtgattttactgcaattttttaaaaataaaaagcactggggtaagagtcaggcttccctcagccgggcacggtgactcactcctgtaattccagcactttgggaggctgaggtgggcggatcacttgaggtcagaagtttgagaacagtcgggccaacatggtgaaaaccgtctctactaaaaatacaaaaattagccaggcatggtggtgtgtacctgtaatctcagctactcggtaggcggaggtgggggaatcacttgaacctgggacatggaggttgcagcgagccgagattgcaccattgcactccagcctgggcaacatagcgagactccgtctcaaacaaaacaaaacaagagtcagccccagtggtggccagggaattagagcttatcttatccaactttccagcctttcctccttgcctcctcctcatcaggagtctcgtggatggcttccctgcccagtgcttacccactcgctgcatggctgtcaggctgagtagcaccctcttgacagtgggcttattatatgtgaagtcttcaatgcttctctatcacatgctttgtcctgcttgacctccttctagtcgctcatccctctaaagttgttgtccatagacctaggaagaaaggggggaaatgggagcaaaatcccaaataggaaatcatgtctgcttggtggcaggggaagggggccagggctttggggccaggagctagggagaagctcaccttttctattccttagttagctttagctctcagatggggatcatatagttacatcatgtaataggccatactcaattcactctaagtagaaaaattcatccaggctatgaactgctctttggctctgaaagattctgggggactgtggggtgtatgctttaatcatggtttgggtggcttcctgtttcccttgctaggctgtgtcaactcactagggcagaggggcatggggctagcatgcagcagggcgtctctcttggcccagtgctccgaagaaagcagccttcatggagatcataatgatggctctgtgtcacttaaaaactcaggtagcctttctgtgggtgtttagcattgaccatgcttaagagaaactggctccgttggccaacatccaatgtgagccatccctactgggcagattttgccacaagccatacctcatgcccagaccttggtccctgacccagggcctacttctccacctccagggatggtgataagggtctacaatactgttaggggcccatgaaaatgttttaatttcttctaatattggaagacaaaaatgaacttttgggtagaaatgttatgtaataatatatttgcatttataccgacatagttataaaatgtaatattaaaaaaaaatttgatgtagaaagcagcccacaaaggcaaaattgccaaggacccacaaaactcacaatggaatcctactctggtccacagagccaagatggccagaattccattttgttcctcagtccaaggtgatctgccatgccctcttctttgttcctgaagcaactactatctgctcccacaatcactgtttaggatcctgaatatttcctctgatatttcatttaaggtttctttttcttctttttttttttttttttttttttttttttgagacagagtcttgctctgtcgccaggctggagtgcagtggcacgatctcagctcactgcaacctctgcctcctgggttcaagcgattctcctgcctcagcctcccaagtagctgggactacaggcatgcagcacgatgcccagctaatttttttgtatttttattagaaacggggtttcaccatgttgcccaatgatggtctcgatctcttgacctcatgatctgcctgcctcagcctctcaaagtactgggattacaggcgtaagccaccgtgcctggcccatttatgtttttaggtgtgtatttcacatgccagtttcatcactcagtaatagctacacgaagctcatggtgagaaaagttcaaaagtcttgtctggagtccatgggaaggaatattgtgatccattagtgatgtctctccaagactgatggaggtgtggcagcacagcgcatgtgctgtatttttacttttgactgacctttgctttgcattcccaacctgactctaagccccgccaacagggaatataccttacatgtgttgagcagcccatactgaaagacgtagagagtctcttaatgcctattgattgattgactgattgattaaagtggtatctgaatacgtttgatctggtttaatgtccccttgacatccttccattctctttcctctttaggcgcctgaacaagaataagctgcaagtccttccagaattgcttttccagagcacgccgaagctcaccagactgtgagtagagttgccttgtgttctctaccttgtgccttgcctggcttgggtgatgtggaggatgtggtttgtggagcgccgtgccgtgtggagcttggcagttaggccctgacatagagacttggagcagggctttgacatgacgtctacccccaacaaacacttccaggcctgacttcttgctccttctctcagacatcagcggcttgcatgaccagtgaggactagtgatgtgtggtagtccatcgttgccttgcaaggagggaggcgatgcttccatggattgtgggtctgaacttacttcaggtaaattccctgaggtggggtttgagataggtttattcacacgagactgtcagtggtctcagaaggcaacggtttggaccgaacatggcaacctcatcaccttgctggttgaagcagctcctgcctttttcccacttcctagcgctgccagtctaggaaccctgggtctgggggtttatgattttgtgggaaaaggaagaaatgtgttgaattttgctttattctcttcagagatccagggtaaaatgaggagaggggagagttggagatacttctatttattcagtgggagaatttggaagcccaggagctggagttgcaggtgagggtggagactgtgattcatgtattgtagatgtcaggcaagtgctaattaaattatcgacagtgaacctgaaatcatgctggcagtgactcagttcatggggtgtactgaattgcctaaggtacacctttctgaatgaagcgacacagtcctggatggctttgcagtcaggtagcaagatttacagcctggctgggaaggctttaacattgcagggaggctccaacgttgtggccaccattctcattcccagtggttgcatttaatgcctacttgtgcagccaaacactgcatataggctctgggataaattgggaaacatgaaacacatgtcagtgtgtgcacttacgaatgagttctgaattaggaatatatatttctatatgtctatacacacacacacacacacacacacacacacacagagactatatacataaatttattttaaaagggcactttgctggaacaagaacaggcaagggttggctggtattccaatcatgcagtggtctcgcttgccttctctaggacacacctgcactttgtcaggtctcctcttgctgtgtgccccatctctctggctcagtcgccctagctgactttgctaaatgtaggaaaggctataccctcctttttactcttccagtctgggtctgcctggatgggcatgggggcggaggaaatgctgttcagcagcccgggggtccagaagagctggataaactatgccaaatgggcataccagaaacaccctggtttgtaacatcccctgcctttcatagccctgcccttagatgctcacgtaatcactatctctccacccagtactgcattgcacctttcaacctgctgttaactaagtactacagcagagtatatactattcatctgagacataagcatcaatttaaaggcaaagggaaggtacctgggaggctggaatgctggacgactttatgtgggtggggtctgagcatcccagctgctgcagcatgtcaggtgggctggttcttgctcacagaaaccttcccatggctatcaggtgatggccattttttgcagagttggtcttgatccaggcaaagtaggaatttcaagtggtgataacaggtctctgagattctgggagccaggcacgtgggcatggggaacctatgagttatgtcctctgccacgtcctgagagcttgagagagtcacttttccttcggtatctaaatatcatcagtaaagggagataccctctcctcccttttacctaccttgtagaggaactgtaagtatccaatgagatcatggtgtacttgtgttttgtaaagtgctgtataagtgtaagcaccaagacaactattattactcctacaattcctgtctttataacctcagtttctgatctcctttctctgggaggcatgaagagactaggagttgcaacaagcactgaggtaaattaccctgagcttttgcttcaagtcagagagctgcagctgggaaggcaggaatggtatttgactcattttggtatccatctcttgctgggtccgtgtccgggcatagctcggcacacataggcactccatcagtgatggttgaatggttagatgaataaatgaatgatataggcctaaagatataaacagtgcccttggtgagctttgattcttttatccactattcattcatttattcattcactcacgcattcagtaaggttttccctgggtgtctgttccagcatggcctctgttctgggtgttgagctgtagacatgaaggatgcccagttctctatgtgccctattatgacacactttgaatggctgccaaaaagctgagagctaaatataattttttttactgaagcagctatattaacccaagtttgggctataatcagcaatccctttttctctctgggcttgatctttgatttttcttaatggccctcttgtgtcattgtcttattttgtcagccactccagagcctttttggaagtaagcagggtacaaattagaaatcaatagctgtgcaatcatgagtgtgtatacatatgccactggctctgttttgaaagagcactgcatctcaatagacacagtgaggcatttttcatgctaaatgtggattctatgtgggtggctacaccagagtatgccatgtgggataaacaattcttgatactactttttttattagtcttataggcaaaactacttaatatttcgtgtttatctgaagactatctcttggaaagtctatagtcatgtaataaaaacaggctttgaatagtaatgaaaagggaaataatatttattagaacctatgctgtgactataacaccactcactagcaagtgacagaagttagtttagtgactaaagttagtttagcccaaagaggcaatatattgattcacataactgagaagagcagtggtagttatgaatggcttcaggaacagctggatccaggggcttggtgatgtcattaagtcttcatcttgctccttcactcccttggaaccgtggacttgtttgtgagctaatgcaaaagactcaaaatgcactaattcagagatcctggtgaagagggccttggtcaatgttcctgtcagaaagaactgagggtagacactgattacttagcttggtcatatatgcccatgtcccagccaaccaatgcttggtcatatatgcccatgtcccagccaatcaatgttgctaatgagatggtgtcctctgattatcaagctgtgttcatcccacttgcttagagaatgggttccccatagtagagagtaattttgttatcagaagacagaagaggggatgtgaaatgtaaaaacaacagatgtctgctagtgtattgagcatccactgtatgcagttccctgcgctttgagtactttggatccttacaatagcacttttagatagataatagcgctagtaaacacgttgagtgccaggtgctgttctgagcacttcatgtctattaactcatttaattctcctaacaactctgtgggataggtactatggttagtactgttctatagatgtgaaacaagtgcagaaaggttaaagaatttgaacaatatcatacaactacttagcggcagaaccaggattcacatttggttcacattttggtaaacctgactccagagtctgcatttgtctctactgggagttccctgcctaagcctcaatcaatgctcttattttatagaggaggaaattaaagctcaaagtttagattactgcatatatatatatatatatatatatatatatatatatatatatatatatatatcccatctatctaagaagcagtactgtactgggcactttgcctcaatgcttagacttaaccatcacaacaatcatgcgaagagaatcattaaatctatttctaaagcttaggggtatctaacttacccatagttgtataactaggatgcaatggaactgggactcagtacacatctgtgtctctgccaagtccttatgttttctaccataccacactgccatgctaattaccgtgggcagctgaagttatgctcaaaaggattggtgatggacctgtcatatatccaagggattcccttaggattttgctggctaccctccgtgcacccatcctcagagccagtgccatccgactcatgtgtgtattagtggggtgtctgtcctcttattctgtgttcaaacacacagaacatgagctatagaatcccagatcttggaagttccctgaacttatatcgctgtggtctgcaaaatgcccagtgaggtctctacgatgcttgggtcactcaataaatatttgtcccctgccatcctgacgtagatcatggtcaagtgtggagactgggcttctgttctttctaggctcttgcagcacctgacccagagcagaggacaggaggaggtagtcaagtgaaagggttaaggggctgcccactgtgtatcctgaaacctttggcaagttacttaacctctcttgtctcaggttcttatcagtaacatagacaatggtagaactgacctctccatgttgttgtgaggataaatgggaattatctgggggaaaataattggcattgaacaaagcacgtagtaaatgctccatggaagatggccacggctgaccttggctggtcagctgatgagagtagtgcgtatgctggggctttgggctctgtggtataaactttgtagcacctagggaaggagtccagtctccaaattagaggagggttggatgaacactgcacttggagtgggaagacctgagtcgtcatgctggctcttctacctgtaagctgtgtggccctgggcatgttacttggcctctctgggcttcatctagagaggacaggatggagcatgatcttgcatggcctatgggctattaatttctccctttgccatcctcttccaggtttttctttaacctactcatgggagagacaatgaaagatttctggttatttaaaggctgactggttaatattgccggaaattctttagaaggagcagaaggcaagatgcagacagtgattaaaatcctctgcgtggctggaaacagtggctcatgcctgttatctaagcagtttgggaggccaaggcagtcggattgcctgagctcaggagttcgagaccagcctgggcaacatggtgaaaccccacctctaccaaaaatacaaaaatatagctaggcatgatggcctgcacctgtggtcccagctacttgggaggctgaggtgcggggatcgcttgagccctggagacggaggttgcagtgagctgagatcacaccactgcactccagcttgggcgacagagtgagaccccatctcaaacaaacaaaatacaccttctgtcttttaccagatgtgagagcttgcggcagggcggagggtgagtggtgagggacacatgggttcacaacttttttttttttttaagaatttatcgttgcagctgggagcggtagctgacgcctgtaatcccaacactttgggaagccgaggcgggctgatcacttgaagccaggagtttgagacaagcctggccaatgtggtgaaaccccgtctctactaaaaatacaaaaattagctgggcgtggtggtgcatgcctgtcatcccagctattccggagactgaggcacaaaaatcactgatcccaggaggtggaggtggcagttagccgagattgtgccacggcactctagcttggatggcagagcgagactgtctcaaaaaaaaaaaaaaagaaagaaagaaagaaaaagaaaagaaaaaaagtttatccttgccctataaggatgagcagaccaaggggctccttttggcccacctatcccagattcaggttcaaatagtgtgttccatatttggtaatggtttaaaacttatagctgctgccggccgcggtggctcacacctgtaatcccagcactttggaaggccaaggtgggcggatgacgaggtcaagagatagagaccatcctggccaacatggtgaaaccctgtctctactaaaaacacaaaaattagcagggtgtggtggtgcgtgcatgtagtcccagctactcagaggctgaggcaggagaatcgcttgaacccaggaggcagaggttgaagtaagctgagatcatgccactgcactccagcctgctgacaaagtgagactccgtctcaaaaaaaaaaaaaaaaaaaaacctatagctgcataagcagttgtactcacagccagatggaggacttatttattctccattcagttatacgaggtatttgacagctttaaaaaaaaaaaatgccactgaggctaaacctgctgtcattcacttgggcagtggagttgcaagtgacttggaaagttaatccccaggcacccgacaactatatgcaatgtggccaaccaacttagccccaagtcactggcgctgttatcatggtatcatggtggagcagattccccaccaaaaagttcaaggctgctagactccagcttccagggaacttgcttcccagggctgagtcctcctctgaactctcatcttggctagtctgcgccgcctcttcatattcaccattttctgcttttatcacaggtgtcgcgtatacatgctccaagcccacacaaattgggagctgcattcagaaccattatctcatgtttctttgaggcagtccaatattagagcaaggatcagaaacttgggaaccagacagacctgggttggaattccaccttctggtgaccctgggcaagtgacctcacctttttcagtcttgtgttggttagctacacaataggaatgctaatcatagctcctataatagcttgctcagctaccatcacaaaataccacacaccgagtggcttaaactacagaaatatattttctcacagttctggaggatagaagtccaagatcaagatgctggctggattagttcctcctggtgcctctctccttggcttgcagatagccaccttccctgctgcctcctcacgtggttgtgcctctgtggtagcataaccctggtgtctcctcctcttcttatggggacaccagttatgttggattagggatccaccctaatggcctcattttaacctgatagccactttaacaacctgatctccaatatggttatattctgaggtattgggattagggtttcaacataagcatttcggggagggagggtcaggggcatttcagccttaatcagttcccaaatgtgtgtggtgaatttactaggggcaggtcctctgcaaagtgcttcacctatattctgtcacttcctctcagatttcagaggtagatacaatattatccccattttagagatacagaaacagaggcctagagatttagacagcttgcccaaggtcacagagccagtaactggctgagccaaagttgaaactcaagcttgcctgacaccagagcccacattcctaaccgtgattcctgtactgtactttggagaagttactaactaaagtgccaggcgcctagttaggaatttagtaaatgctagctcccttatctctatgaagccctaaaagagctcagagttgttgaatgactggagccctgtacctctaggtagtgctttctgctactcacagagccctttgcagtcaccttagtcttccaattcggcactaaactttaaaacataactacaagcaaaatgtgtccctataaaactctgcattgatgtgaaacagtgctataaaagtgaaaaaccagtggagaaaacaaaaaccatactacccaaatttccagtggagttattgtctgatgtggtgaaatgataatagcacaacagaaaaaccaatccatcaggctggtgtggggcttcagaggctgcccccctgcctgaagctggatgcggagacctgctcccttgtgcgctggcatggatttcagaggccgggggacggcaagaccagcctcaccatctcatacatggggtcacgttttttcagggacacagccacccaaagctcatggaaaatgtccctgcaaactgagtcccgatttcctgatttttctccttgttcccccaaacgctgaacactgcagtgaggccagccttgtgtttgctttatggcacatgtcatcaattccagagtttgtgatgcttttgaagacaggttttgctttaatctgtgtgtggacagagaatggattatggtggttgctgtgtcattctctctgtagtacctgaagccagagccagggatgaaggcctgggaggtgtcgtctctctcctccgataggatgtgtccagctgagcatagaagcctgcggacttgccacagagttgataacaaagccaacatttaaattgccttgtagattcttgcattacagaatttttgagctaggaatagcaatctagaccagtgcttctcaaactttagtatgtatctgaacacctaaggatcttgttaaaatgtggattctgattgtgtaagtctggaacacgacctaagaatctgcatgtctaacatattccgaagtgattgtgctggcctagcaccacagcagagcaaggacctaggctatggttggttttcaaacttagcatatagaaacaaatatcttgaaaggatggttaaaatgctgcatcccaggccacacagccgggaagtctggttcattagatttggaatggaccgggggatttgactttgtaaataggcaccctaggtgattttgttgtgtgtcacttaggggcatactttaagaaacatcgatctcatatagcccctgttattttatatattttgaaggaaggaaccaaacatcttttgagcacctaatgtgtgctaggtaccttatgttgatgccaactccttcagtcctcccaagaatcctgcatgaaaggtgtttttatgcttgctacactgatgaggaaactgggcttgagtttcactcactcaccagaaatgaacccaggtctctctgactttctcaccctcttactcctgtgagttttttccctaccttatgatgtgctttctatgcagaaacacatcttgaatgggagagggataacaatcataaatttatgaagctttcatggttcagtattttgaacttataagcgcatatgagtatatataagcacgtgctcttatctgagatctaggatattaatacttgaaacattgaaagaaaaagatttatagacctaaatacatgctagcaagtagacctttctaaattccctacaatttatcaaaggtagagttgggttttacattttagtctcttcagccctgtgggccagcagaagagttttctaaagtgatcgggcaatacttgtactgagaagtacattctgccagcttggaaattgtttttaaattttttttaagaaggaaagaaaaccaagctgtgactttacaatgctttggaattacagaatatgcttgtaatttttacaattctgcacagacttctttgccacatctggttgatattactggaagggatatatgggggaataaaccatggtctggaatgtgaaacatcccacaaaatgagtttcttataggttgctgcataaaacattttgaatctccttctctttggaagggtggcttaagtgatttcatggatttagtattttctttggtttgaaggtaagggcttttgctggtttacttggtgggccttccaagatggttttctgaagatgtttgtgtcatcctagagtcatgtcatggaccagagtgagaaaagccatcctttaaggaaatcagaccaacctttgttgaacagcactggaccattagagataatggtgaaatgtgggaccaactgaatccctcactgcaagaaaggaggcatgtagggagaaagggttgtatgtgtaagggcttcagaaaaacctcctaaatcttggccatggtggtacattgaacagctgatggcaagacaagctcacctcctcgcacatacagctgaaagccttcatacatcagtgtactctctttactacgtatgaaagtagtgagtgaggaaaatggaaaaataaaacaaacacccagcttatacttgggactcagtcaattccctgttgttaacattcctgccccctttctaggaagagaagtatgtgtccagggacaactaaagtattgttgaacgcctactgtgtgtgtcactccaatgtgctggtggttgggatgctgagtatagaacccagaaatgtctaacctgagcccggagggtataagtgtgggcttcttgccacctcgctctttctcagacttccttggctgggacccacctgtggagttgaaactgtgacagctgagccctttctgcacaaaatcagtgctgctctcagcaccctgtgacctgtggtggggttggccagcctaggcagggttttgtggcatcaccaagggtactcaaatagtcatctctttgttaagaacgagaaccagaagccagccttcacccataccattcttcattctctttatctggagttagaaactatccatggaattaaatattagggaaatactgcattgtatatagaaaaataacaaccttttgaggtgagcagaacccaaacacacattcttcagttgtctgaaagatgcaaatgtacccacatcaataatcttgaaatatttgttcctgaaccacattcagcatcaacagaaacatttctaaagagcctaattatctctcattttcaaccaacatttgggaatccctccaggggacaaatagtattttaatttgatgccccaaattctagcataatttcaaatcaccaaaaacatctgtaactttgtctttcttctggctttcctatggactcagtatcttggatttgaacattaaattccatttgtaaggtttgcagttcatttacaaagtccaggaggttgaggtctgtaatgaaagtgttgatacaatattaacaacagcaaagctatgataacacagcactgtccaaaccaaatagaaatggagacgtttaagtcaatttcatgctccttgcctaaatttggtgagctggacctgagtttttgattcatggtttagaataatattctgatgttttattcatgatgtttcttttttcccatcgttccttttctaattctcctcaccctacttatggtgatgaagcctgcttagaagtgtggcccgcccgccccttgattagcactgcctgttgcgtagccaaaaactctccccacggttggccaagtggaatatcctgctgttgaactgatggtttggcctcttgttggcgtgtctggggctctggacttgaatttttagtcaacgagtcagcttttgattgaaatatatgttgaatcatgccaacgtttctccagataaagggaacatcttgacttttggaggtcaaaatgctctgtctaaagaagaaaactggattttcaagagagtacaaggataacctatgactaatctcttctatctcagtctcattcaatttgggatttgtgaaactgtattgtggatcaagatactcagataaatctaacttcaataatttttttttttttttgagatgaagtctcgctctgtcgccaggctggagtggcagtggcacgatcttggctcactgcaacctccacctcccaggttcatgcgattgtcctgcctcagcctcctgagtagctgggactacaggtacgcgccaccacacccagctaattttttgtatttttagtagagacagggtttcaccatgttggccaggatggtctcgatctcttgacctcgtgatccgcccacctcagcctcccaaagtgttgggattacaggtgtgagccactgcacccggccaactttaataattttttaaagatgaaaaccagtggtagcaatctagagagaaatgaaaaatcatcagttttactgatattgctctaatagtcttcttcctatatctgtctcccactctgactcctttttgttaaaagcacaggcacatacacctaacgtaccacgcacacacacacaaaacctctctataggagaatcccagacagataaatgaagatcctttttgggctgctgaattaactcacagatataatttcactttagtgcaagacattgactattaaattagctcaaattattgggcaatgctatggtgagatattagggattagaaaggcagctgcagtgatggttgggggaagctctttgacttcttggctcataattggtgtttttggtccatagagatgatagtggcagatctgtgtcagagacagtaaattattactgtaaatgttttctggcctccagggagagctctcttttccctggaagagatgtgcatgggtcaggcttccaactgagaccttcagggactttcatttcatgttagaactcagaacagaccattgccaaccaccagttctcaagggcgtagccatcaaacaacattatcttaggaaataattgttaggggttccattgctaatggtattctctgcagatccttttcccttatgtgtgacacttcctttatttaaatgagagtgaaaggtgggagatcattaggtctaatggggctagaaaaagaagcagcagggaaagacagagttgctcagggaatattctgttctccagttcctccctgagtagagagctgttgatgtgagtgatgtgcatattgggtagaatttgccatctctgtcttcaccatgcattaccaatatgttcaccaccttttgtctctgttgccatcaccgtggaccagcagtccttctggctggatttcaaggacctcagtaatcttcctgctgtgtctcctattcctgtgttgttcattgtcaatctaacagccgcaattattgttttaagggaaatcagatctcctcttttccccagttaaaagttccaatgactttacatagtcctgagaagacatcctaagctcctgcactacatcatctgacccctggtacttgtcctagtgccatctcatgccactctccccacatccactgcactgaagcatcatgagccttcttcctgttgctccaacaattctcttcttggctttgctgttccttctgcctgggatatgctgacctcaaatgtcagtgtggccagatccttcctgaaattcaagtcctggctcagccatcacttcctcagagaactctctcatgacaaccctgtctgcagtcatggtccccttcctcattggtcactgtctacaagatgatcctgctctattttcttcatagcacttatcactacctgaaattctttttgctcatttatttgtttacttgtttgtattttgctctttcatccccccatagattgtaagcttcttgaatgcagggattttatctgttttgttgactctacagtcagttacctaccactgcatctagcacatggtgggtactagctacacactctggaaatgagcaaatgagagaaggaacctggtctctccaaaatctgctattccctctcactatatggtcaaaggtgccttttgttccaaaccagagctctctcctcattgccctgcaaaagccccgaatgactagttaacagcatgtgtgcacagacacacacacacacatatgctcatgcacactcacacaagcacacacaaatgagaataaaactaactcggtggcaggaggatttcatactccaacagtgggtctcccaccaaagagaaagaaacagcctatgctagaatctcttcaagcagatgtgagccagtgcttgagactgagagctggggaggggaatgttgtttttgatgcagtttcaaagatctgggaataatattctgtgatacagtgaaatggaaagataagctgtgttggcttcatctctaggcctcattgattttttaacttctaatagacattgaaagggattgtctagctattggaggcctcaccttagtgaaggctttacaaaaataacctgtggagactcaaacaaaaaccaagccttggtctggaaaaaaaaaaaaaaaaaaagaaaaaggaataggtttcactaatttattgaacattgacctaaacttccaaattatttttttttcttgatctgagatctaaaccagaggttgtttgaaagacctctggtgaattagtccagacctgaaatgaaccatatcttctaaaataattgaaccagaaccacactggtgcaacaaaatattaatgttttccaaactaactctgagactctggcttggtgttgtataaagctgtaccaccaacctactgtttgttcttctcctacatcctgcccccgcacccctacctgtcacttctcctttctgcaaacctaccatcattcaatcatgggcccgtcacccacattgcaccgaagaatgtgagctcttgagactctctttatttgctcaagagcaataaagtcaatgagagaggctgctgttaggaacaacctgacttcatcactatctttaatccatgtcacaaagaaatagaagaggtgtcttgtgagtgaggatatattcattaaatgaattgggtgggggaaggattatagaatggaaagaaaggaagacaacctgaagaatggaagaaggggaggaaggaagaaaggataacagcaacaataaaattaaacagggaataggggtgctaaagatagagatctggtaatagaaaggaaagaaagaaaataagaatcgtgtgtgtgtggtggggtgcggtatatctcaggtttgttttagtctttttctggctcctcccaaagcagctggaagaatctctgatcgcacgtgtgactctccattctgtgccaagctctgtgtaagctcttgtctctacagcaaccgttcagtgtgtaaggagccaccttcatagaatgccagagctgaatggcaccttctggaatttctatatcaatgccctcattttacaattggagaaactgaggcagggagcagtaggggactcacaaacctcagcactcagatttctggtttgttgctgtgggcacagcccaaaggtacctgcttaccttagccgtgatttttcattaagcgacaggggaatcacagaagacagaatcttagcttacaagaagtaaaggattgatgcttccctggtttgggccagctgggatagcagttacttttttaagaaaaggatgttgatgatactggtgatagatttgctgcagaaactaaggattagcaattctcacctgtagaaaaattgtgagtggttctaccaaagcactaggactgcctccacgtggttgctgtcatgatgtactttttttctcaaggaaaggagctgaaaggacaaacctcacgtgagagtgattccaaggaaagaaccaacagaagaggcaatcagaaggaaaaattggaagatgactccctaaggattccatcctgctgttgggagagtggcagtgccatccaaaggaagggaagagaaaggaagtctccttgaggtgggggtgacagtgactgcttcccagagctcacagcagttctagggaagacaatccattaggagtccagtctccaccctctaggcatttcagaagttaaaaagctaaagtcagctttgaatcggcatcattttcttttccatcccagatagttacttctcctttataaggagcctttgtatttaagaaaagaccccagcctggtacttagaatcccacagccactgaggacctgaccaggctttcctggtgggcagggtcactgcaccctgcttacctactatatataactcatttacctgcagctacttagccagactccagtgaggagtcccaaattgctatgctaatgatggtagccctcccctcccaagaagtgctgatttccccgctcagcatgagggacttcaataatatctctttccagtgatataatttgattcctccatgggatgctgctttggtcctagttcacttagcactaaatctctcgttagatactctcatgacttaatcttttcaggccccagatcagcccaggcctcttatttatttatctggggccctgtttacttccctgttgtaaattacttctggctcctggccgtctgattgctgcagtgatagactaatagctcagagctactgcatttgccttgtgtgatgaggcaaataatatgcttaacttatgggagagaaatgcaccctccatttatttcagtgggggaaaatattactcaggggaaagggccaaatcatttacctaatggctgctggtggaagtcgatgtaattactgacagaattatgtgaaacaaattgtcatgcctataaatctaaacctccagttctcaaaggcagaggggggatttcagtggctttcatgggctctgcctctggagccctcgaggtggatttctaagagggtgctggcagaaagagggaggttggccctctagttttcttcaccaggggcatgttcttcaccagctccaaacccaagcctgggcagactacagcctgtgagccagtccagcccactgccacctgctattgtaaataaagttttattggaacactgccacacctattcatttacatatgctatatggcccctttggtgctacagggcaacgttacatagttgtggctgagactatactggccctttacagaaaaatgttactgatctctgatccttattctaccagaagaaaaaatgtcaaatattttatatggaaatggagggattaatttaggtcactcctcttaacttctttcaaacaattcaatgccatagtaaggaaattcgaaggatctaggatggttatcacttactctgtattgcttctgcctctattcattgcatcttctctccacaatctggtggctagtaagtattagaaacccatttgacggaagagaaaatcgagactctgaaaggtgttttaggcaagctcattcagcgaagaaatcgcagacctggcattcataccttgcccgtcaggctttaaattctaccttctttcaggtaaacctcactgtttcctgagaaaaagaaggaagaaggcattggctttcttggggagacttatccaggccttccctctctctgcaaaagagctgctgagaggagacatgtgagcagtcaaggcagaggcacagaaagcaagaagaggagtggaggacttggtttccttcaatctgcactcactgtgggcttggtggtggagcaggcccagaagtactttagctgttgagaaacattacaaatgtttatcaaacaacaacagaaaagccaaagagaagaaaccctgggtgataaagagcttacttcatggactttgttgcctgagcggtgctgactgctggagagagagcaaggtccatatggcttccttatgggggacgtggaagtcaccagccctgctgcagccaacatggagacatagtcatggctctcaccctgcaggagcagctctctaggctttggggtagcctggggccagattctgttgccctgagcttcagaaacaggcaaaggaaagaaaggtggtgtgtaggaaaggcctgcagatattaccagcttgtctgtggaagccacagacatctcagggtgaaaacagagaccaaaagtacctcttgcaaaatagtcattaggctgtgaacataggaagacgagaagatatagtggaaataatagtcaataacacaaccacgaagcagcaactattatttgttgaacgcttacaaagcaccaggggctctaaatgccataatcttcagaatctcctttaatcttcataattatcctgggaaatgggtattaccatttcattttattatggaggaaatggggctcagagatgataaataatttgctcaagctaaaatttagatggtggcgctgataacccaaattgcctaacccattaacctttctgtgtactaggagtgggaagaggggaaaccgcagatttgaagccacactaccatatcccacctccaccacataggtccataattttgtttttctaagcctcagtattcactgtgtaaatggatatagcaacagccagagttgtggagacagtcaaggataatggtgtattgtaagtatcagtctattctctgactcatattaagggctcatctggcccttcttcattttgttccttcttcccatgactaagacacagacccaagctttccatcattgccgtcattgttcattgtctatggtattcctcagagctctgcaggaagtgggatccacagacccaccttctgcctttgaagtatttgccatctaaaatgaacatacatttatggaacacacagtcaggagccaagaacagcccaaacagttgtgaaaagagcaaagggtattttcatcatatgcatgtcaaagggagttgcattttagaggaagattttttttttaatcattcgtctttgttgagcttcagctccatgggataaagagcggagagagatctggaaatatgcaggtgggacaggtgaggacaggctgtcacttttttttttcttttgatcacactgggaaagctcttggctcagatatctcctctcctggatttttcatagattgtgacatactcttagatgagttggccttcagtagaacttaaaatgaaagaaaattagcagtgttttgtactgtactatgtgctgggcaggttctttctccagcatcctcaatttatcttcccaaccctgtgagggagggtattagtggtatcccatttgacgtcaagggaaagagtttaaagaacttgtgatctaagagttaagagatgaagacaaaaccagaacaagagtctttccaacttggaagctgatcatacatatcagatgctctgtcttcactctgagaaggagagatgctctcttcacttcctctacctttctaatgtcaccccagctgctggaaagaaactctaggaattatcgcaggggctgtgtgtggtctcatgggggtctgactacttccaccctagaggaactggtttttttaggactctcaggattatcattgacagaaattaaagaaatgcaggataagggaaaatgaaccaacaagcaacaacattggcagtgcagagccttgaggtaggatggcccgaaagaccccaggctcagagcccactaggtcttgtcttcatccacatctcacctctgcatcttgcagcttctttcaggtgtgcccttgtgatggagccctggcagattggcaccatatccttactggtttgtaaccagagaagggtcttctgtaccgtttgtaccagaaaaccctcagggaaggacttctgttgggcctggcttgagccacatgcctttccctagacccatcactgtggatggggcctggggtcttggatgagctgagtgtgcatcacatgtccacctttggtgactaaagaaagggagatggattctaggcatacagagactggagcaaacacacttcagccagcaggagcgctgagcaggatgtatgcaaaagatgacagtcagccttctatccagagtaccaggcttcttcaagcccaaagtcaggcctagagtgccatgcaatttaattcccttgtcctctgaaaatagggaaaatacatctgcagctattctcaagaacgacctaagggagctacagaggagcatttaatacagtggaggagacgtcaagactgctgtggtaactgcccagattagaacatttgcattcctaagactgggaaaataatgtgaggaaggaatgcacactcaggaagggtgtgcccttgttttcagatctaggagacagcatccttgaagcttggcagaactataggacaatggagggactcgatggaattctagatttcacctcttccttctcctcccgctttcactccttacgtactcctttcagtcctagccttttgcggttcagttaccatgttttctcttctctgcatctttatgccttctaactcatacctggaaccatcctctcactttctgctatccaactgaatctcattcttttttgtttttgagatggcgtttcactcttgttgcccatgctggagtgcaaagacgcgatcttggctcactgcaaccctcgcctcccgggttcaagcgattatcctgcctcaacctcccaagtagctgggattataggcatgtgccaccacacccagctaattttgtatttttagtagagacggggtttcatcatgttagtcagcctggtctcgaactcccgacctcaaggtatccacccctctgcgcctttcaaagtgctgggattacaggctgaatctcgttctttaaaattcattgctcatctctccacctctaggaagccctccctgactatgctggtcttatttattagaaagacttcttctagctctagcttccccagcaaactattattgagcatcagccatactccaactccgagactggtgctttaactgccttccccaccatgctatgagctacttgtgagcggggaattgtatttttattttttattagcagggtttagtacagcgctaaaatattttttaatggaaaaaatgcatgaatgggaagttgtgctgtaagagcagatgtcaattttatggaattcattacctcagaggtatttgaggcggaggatgtgaacatcagcttcccaaatgtctagatgtgcgtttcccaaatgcattcattttaatgggtgttcagcaacaaaaggatcctggtcaaataaattcagaaagtgttgtgctaaaggatgtatggaaggcttcttgattgcaggacttctcagggtatttaccatgttaatatgcaccgtgaatttccaagatgtgaaagtatatacgcagctagttcccaaacaccttttgactatagactgtgttttggatgcatttggtgggacttgagctttataggactggtgttaagaaaatgggaagttacaacttcttaatattaggttaattcataggttaaactgacataaaaggaccctgaaataagtatctgaggacaatctggtatttctcctgggaacccagtggtgatcaaaatgaaccaaagatttgtcaatgcaggttggcaattctgtggtcccatttcatttcaatctcaacatggcctttgagaaccttattgttattattagtccttttgtagcacccattttcctctccaggaccttttatccactaaagttgaaaaacatttccgaggctttcttatccccctacctccttcccaaagcttcctctgatttgctagaagaaaggtggcatttcccctccatgcctacactgtctaaacttgctggacctctttccttcactctttgtacaccacccttcacactttctcaactctatttctggcagattcctctagccccaagggggcagagaatagccgtaggccccttaggcattctgggtgggttgttggaactcaaatctctttctgaatccaacatccccattctccaccccaccccattttcctctagggatagagtgaatttttcccagctgagtcctccgaggtagatgtctgcaaatgttcagcaacttctccaaagcaatgaatattcatgtattcacagggtgggctgcattccagcctcagggcagggaccttgtttgctctgccatcctgtttctcaggactgaggtctaatctgtgtacctccagttgggagaccacatctttggctgaaacctctttcctgaggctttcaatctagggagtgctatacaatccttggggctgctacaacctctggaatcttgctgttggatatttgtgaaaaacacacaagcacaaaggaaacttgcaacagacacttgtactttttccctccacctccccacacacatttattttgcccattgctgctctacacttttgctcaagaccattctccctgcctgggataccttgcctttttttccaaggatcatccaagtctagagacagtgccatatggttcttaagagtgagggttctaaactggaaagtcattgcaaacatcacgtgaaataatccttacaaagtgttgagtacaatgcttggtgttcagtaaacactagctatgttatctaaccctcaagattcaaatcctcctcaatcagtgaaaatgctgcagccatctctcctcactgaagtctctctattcatctgtgccctgaattcctcagcatggtcagcagaaccacatcagtcacaccttttatgatgtctttggcattgttttaatggactgcttctcattttggtgttattaaccaagatgttccctctgtttctgccttttcttccccaactacatggttggtaaccatgatgtctgccaggtagactttgcacagaatagattgttaatttacttgtttttttaattgggctacctgattggtcaaagtcaaggatttggaaaaaccacccttgttctcccttttttgaaactgtcctttcaatgaaagagattacaaaatggcagtcccacaggttgattcctgccaataggaatgtttggcccataccattttttaaaaatgagctgactatatttaaaactggagagattttatataaaaattcagattgtttgttcctgtccccaaattgggcgctctggtggcagcagcaacacagggtttggtgtcctctaaggtagcagcctgcagagcccgtttagaggggcgtgttgtctccagcttgcttccattcccatcagtctcactgtcccgcatgggcagtcttttaagcttgggggacaaaaccgtcttcattccccaacagtgcttcacagaagaggtgactgaagcctgcaagcccaggaccaacaattggctgctgaggcaggctggctcttaggactcttcctcgctcctcaggaggaagagcaggcccctagcagggctctctcttccttggttgcctttggaagttatgactcttccggacttctgtttgatatttccgcagtcttttcacccctgagaagtagatgggaccaacatcatggtcttcatcccaaagaatagggtgcctagcaacattgtggtcctcagatgctcttcccaggatctgaaagccagtgggtgtggaggcggcatgaggtgttcaaatgtgggtgtcagtgtgatcagttgatcttcatagcacatttgttacctcccatccagcaaggccacatccctcatccgagtgcagtcaggaagggtctggaggttccctccttggcttccctccaggaagccttttgcctgaagggactattccctctgcgaggaagggcattcctgaactgcctgcccacatcacaggcttccaccccaggggagggctggacttgcgctctgtggccagtccctgcagcctctggcatcacacagtcaagatcaggacttgaagtttctctgcctggtggggctttgcaaatagagggtttggagcaatgggtagatgtgttttgaattgaagcagttacctcatttcatctcctcagtcaggtcgtgtttctgtggtgatgcagcttctctctcaagtttagtcttctcttgtctccaagtcttagttatactgttgctggcaagtaatttggggtgtgctaattaccatctgaactgagcagcaattctctgatagggaccaatttgtggtaaggagactttccttgccagggatcccctctctaattttcggaaccatgaaaacttctaccattctccccagtttgacatctcaagggcccctggcctcagacctttttgcatggaaaggctgggagaaaccagctaatttattttcctgagttatgttattgaaacctgattccattatttatttcagaaaaaaatgtgtgttttcatacacttcatatgtagacaagccatgtaatgatatattactctggaagcagcctttgagagcttctagttgaggcatggcaaagagattatgtcctggatgcccactcggattagataaatggtgctcagggtaatatattgaacatgactctgaggtcagaaaagctcagaaaaggcatctggggatatattaggcctggatgccgtggacccaggacagggaacggagcacattccctaggtgctgtcactcccatggaactcatgctcttcatctagcaggttaggagccggcacctagagattggaggcaactaggatgctgctgttgcttacaacacctctgtgcgagttagaaaaaggtgatcccccccccactctgggctgaccctgctctgggatcacagggcttgggatgaatcctaagtgaatgcctcttaagcaggctccctagtgctttggtggagggagaggagcatagagctgagtggtccccagtctgttgtcccagcagggtctctggccactggccaatgccagcaatcaaggaacttctccataatttgccccaatttgcccccatttccccttgttcctcctgaaggatgcatgcagctcagacttcagccatcagccatcagagcatccctgacagtttgaggccttgaaggggatcaggtgtaactgagtggtttaaaagtatgaaaaccagacagatctgggtctgaatctcgactttgtcactttgggtccttggccaactgcttaatttcccagagattcggtttggtttggttttgaagtagtgactcctactactttttgatttagtgacacctaaatcatagagccgttgtaaagattaaatgagatgctgcatgtagagctcccagcacagtgcacagcatttaattaacactgtctcagtaaacatttgctatttttatcatctgactagtggagtgcattttcccctgtcagaaaggcttcaaggcaggggagaacttaaagccagattgtgcagcagccccagagagctggtgttctgcagtcgtagaacaatagaagacaagattgtagaatatttattatcttttaaagttatttttcaccttattaagaatgatttgagtgagcggttttggatataatactaaatcacagttttgtaagatgcatagcctactttctggaaactgttttcattactgctagactgtaggaaggggctgacccgtgcttagagtgaagggcccaggaggatgtgagggatttgggttctgttgacctacggtgtaggagaaatgcttgaagagatggggaggagctcccacaggaaattctcatgtttgtgccagtctttgttgccagaaatctcaacagaacatgaaagttcagatccccagagtggacaggctaggaaattctcaggtagagttccaagagagatgtgtgtaccttccttcaggaggagtaaggggaaacgggggcaaactggggcaaattatggagaagttccttgattgctggcatatggccagtggccagagaccctgctgggacaacagactggggactaggtagtgcagccagagtgtcagtgaggggttgctgggtggcaggtgggcggggcagagggtgctaggaagtgggtagaggaagcagaagttcaggtaccagaagccagcctgcctgggttgccaccctctgctccttaccagtgcagattagcctctcagggtctcagttttgtcatctgtgaaatgggcatgatcatagtacttcgctcccaggattgctgtgaggattaggtgaattattgcttaaaagtgcttagaggccgggcgcggtggctcaagcctgtaatcccagcactttgggaggccgatgtaagcggatcacgaggtcaggagatcgagaccatcctggctaacacggtgaaaccccgtctctactaaaaaacaaaaaaaagttagccaggtgtggtggtgggcacctgtaatcccagctactcgggaggctgaggcaggagaatggcgcaaacttgggaggcggagcttgcagtgagccaagatcgcaccactgcactccagcctgggtgacagagtgagactccatctcaaaaaaaaaaaaaaaaaaaaaaaagtgcttagaacagggcctggaaccaagaagtcattcagttcatattggtcaatatcatcggttttttttgttttgttttgtttttgtttttgtttttaagagacagggtctcactctgttgcccaggctggagtgcagtggcacaaccatagctcactgcagccttgaactcctgggttcaagcaatcctcccacctcagcctctagagtagctaggactataggtgtacattatcatgtctggctaatcttaaaatgtttttcagacatggaggggtctcgttagtttgctcaggcttttctcaaactcctggcctcaagcatcctctcacctcagcctccccgagcactgtgggattacaggcgtgagccgccgtgcatggccagtcattgttattaacaaagggataggggaggtacatgggaaagtcactttggagaatattctacattctccaagtgacatgggatcatacacaaacctatctagataggaggcatcattcttttcatttcttccattctggagttactctcacctgtgctttttgggcaatgactgaagtaaaccagaaactggaaacaatgaggcctgtagcattaggaaggtgatattggggatggactgggtgggttgaagagggcatggtaataataccatggagcacctgtcgagctcccacccttttgttatgtgctgaatttacctaaccacaaacagatgccaggagaggtgaagtgacttgatcaagatcccacagctgcattataatgaggtctcactagcatgcagaccgagatgtgtgtgactctgggactctcgctgtttctgccacctcagcccactcccccattgctcaagatgatctccactgccctgcgaactgtaatatggctctcatgggccttgatgtgcccgctgctaaatgaagcatctgagcatgaacacgttgagagaataattcaccaggcagcccttttctcattaagaacatgtgtcagcaaacgattctctagcccagcatgaacaagaactttggggggagtctttggtctccatggcaaagacggctaaaaaacaaaggcagtgaccccagaagaggaggaggagaaaaaaattagtagcgttagtcttagatggaaaggtgaaagaatgtagtgcttggtttctggagtcaaatcctggctttgatctttactgtgtgaccttgggcaagttatttaacctccctgtttctgtttctttatgtgtaagataggcatgatgatatgaatagtgcctacctcttaggtttcatcccatcaacaaatatctgctaagcactcattcagagctaggcactcagaaactatttcattctaggtgctggggacatagctgggaatgaaagagcaaaatgcctctccttagagggctcatattctaatgggactcccattctagtgggggtgcacttgatagacaaggtaaacacataaagcaactggtatgttggacagtgatacatgctaaggagaaaaattacacaaagcaattgtctttgggggtggaagggtggagtgaattttagataaggtagccaaggaaggctttaataagaaggtgacacttgagtaaggacttgaagaagacttgaagaaggtgagggaaggagccatatgcatatttggggaaatattgaatgaacgaatttgtcaaatgaatgaatccgtgaaaaaatagggttgtatggatgaaatgtgatcacaataaatgtaacgcacttagaatagtgcaagatgcatagtatgtgctcaataaatattagctatcttcatatttagcagattaggcagtgaagttgttgctgtcactccccctacttctggctttctgaaagcattttcaagatacgcagaaaggaaggatacagaagcctcttctgattctattagcagactgcatacaataggatctctcttttaggttggcctaggcacaagttaagactcatcacacacacctggattataaaaattctcttatgcatgcagcccttctgaggtttctcatacttttgtgtaaattgcatcacttgtttcttccaacatccctgttgggtagcaaggcaggtgcctttagttaccccctcccctagcaaaggcaagggatctagcatttcctgagcacctactatgtgccaggcactctgctagttgttttgcctatatatgttggctcccttatccctccctagagtccgggaggtcatgcattatcattactgtttgaaagatgaggaaatctaggtctggctccccagattggcacagcaataagctgcttgctgggcctgaagcccaggcatccaacggcagggtatcttctgtggctcacgcagtgagcctgcccccatctttgtcccgaaaccttggcatgccaccccagcagggcagccttgcctgggaagcctgggaacagggcgtgttgttggcttgcagtttaattgaagtggaaagcagcccattgagacaggcccagatctgttaatcctgcttgtaggaatgctggagataaaagcagccatggacctagagaacaatagctccacataccagcaggaaagggcactgtcattgccccaaaccaaacaactgccagggcctggagggtctggcggggaaggcccaggatgaggctgactcatagagatgacagaacagcccggagagaatgggaaaatgtagaaggccaagtttaccccagtgcatatatactttggggctgagtaatgtggtagacaaatcactcccttcaccatcccacccagagtggaagcacaccctgaagcctcaaggataatttctacttaaaacagttgagtaaaatggaaccacagactctgctgcttcttcaggaaaaggggctgcggtcctgagactcccaacccgttgtgctagaatgggaccttgggaaggaaagctttctccgagggaattgaattagccggaaatatttaagatcccattttccctcccattggcttgtatttactggtcttgatggggagtccgaggatggtacttagaggccctgcaatggaaattctaaaacaattgaccagactttcgaatgtgtggttatgtttagatgtcttgggttgctttcccctgactttgaaaaggagcagacaaaacatgttgatttgcgaacatccttccagaacataaatcactggggtgagtgtggggttggagtctgtcatagctcactgggagatgggcccactgcctgtctttcatggtctcccctttgcactctgccctctgccccatggacattctcactgggggcccgcaagcatcacctctgcccaggcccaaaggaacgaatggggcaaaagtttgaggaatttgccttggtgagttttatagaaaaactagcctgaaagtggtaagattggaagagcgcaggagtggtcacgtcacccttccttccgttgtccagtagaatgacactagatagttcctgaacttccttagtatttcccgatatgctctctgcaatgataaaatatccagattttatctgggctgatagctcatgctatctgtctaatcgctttggtgaggttgccagcctcaaggagaaatcagggagaatcagaaattaaacatttttcagtcatttttttcacacatataagttgcattttggttgttcctctagagagacactagggaaaagggagccgctatgatgtccacagccctcattccaaacacccattgattaaacagagcctggctcagaaagcctgtgtcgggattaaggtactcatgtatcttaagtgcaacttggatttcccagttcaacctgggcttcatgcattggagtctgcacgttcaaagtgaaagtcatgtaaatcagatgaatttgactatcagcctggcacaccttttcatttccttttttttcctcgcacggtggcctgggctggaatgcaatggcacaatcttggctcactgcaacctccgcctcccaggttcaagcgattctcctgcctcagcctcctgagtagctgggattacaggcacacaccaccatgcccagctaatttttgtatttttagtagaggcggggtttcactatgttggccgggctggtctcgaacacctgacctcatgatccacccacctcgacctcccaaagtgctgggattacaagcgtgagccaccgtgcccagccccttttttaatgatcatcagagccattttcttctccctcctgtctgttattgagatatttactctgtgttggaatcaggttcaagttccccattctctgcaggtctttctcccttagagctatctccctactcctaccttaccttcctattatgatttggcagtgaatcctgtatcacctggctgacagatcttaatgatgaccctggccatttagcaactaagcctcctaccatgtgccaggcatcatacaaggtcattgccctaacttcattttatccttacagcagcctgaaaaggtaaggggagccaggcccagtgagattaagtgacttcattaaagtcccactcataacaatcggggtcaggaatggtgtgagctctgtttgaccccaaacctctgaacacggatgctttgactcatggtgtggtcagtgctgttggataactttgcgcacatgcttgtctggttttgataattagggaatatgctttgcagggcaggaagctcacatttctttgtgtccccatggcatctggcacagcacttttcactccaaagacctgcatgactgtgtgttgcttgagaggtctgagcagctcatgttcactttgtgctgataacctggagacaggaaggaaaggaacttcttctcctgctgtaagggcaacatggcgatacacagcacatctcaaactctgtgcatcccagtctcctggaggacttgttaaaacaaatcgctgaacctacccaccagtttctgagccagtggttctgcatggggctggataatttgcacatctaccaagatcccagctggtcttggaccccactttgaggatgactgtcatactgggaagtacaacccaaattcgaatcccatctctgtggcttactaaccacgggcaagtttctagaactctcaaggatccagtagcaccctctgtaatgaaagcataataacatcaacaagttgttgtgaaaattaactgaatatcccatatatacatagtatttctttagcaaatacagatacagcactttatatgtgctaaacacgtgttggcaccctttacaaacatgaacttaattctcataacaaggctaggtagtagtccctctgttttcttccttgtacagagaaggatactgaagcccagagatggtctatgacttgcccagggtcacccagctagtaagtgtgcagagctgggctataatccagacagcctggctcctgaggccccaccctcagctaccacagtggacagtacctggcctgtctcttccccattcccaggttacactaagaatgggccctacaaaagggcagagattatttttctagttcataggcagattaaccatacatgaaaaaaaaaaaaaaaagactgttttatgaccacagctttgaaaccacatggttggcctcccttctgatatcagtatggtcagccgggagtgactgtttctctttaaacatctctggcaccgaggtttatcattgctcaagaggacggtgctttaaagaggccttcaggctgaaggagtggaggcggcaggatgcgggtcagtaataaaagtgaagagagatttgcagctcccccatggagggcctcaggagtctagccagtgggcgggtacagaggctcggcccaaggaaggggcagtgatggacagggtgggaggggagcaaatagtttcagcatggcagagtaactgaagctgagagggcaggcagtgggagaattccagctatgtcatgggaaatggctatggccagggctctgaattagcggccgaccacaaatcccctgggaccctgccaggggtcaggagactggggcaccgctgggatgccaaatggtatgccatatttcattgtcagaggaggaggaggcgattttaactgttatccctagatgtgagtgctggcactgccaggagctgagagctgggtggggacgtatgtaggagtgagagagaagctagaaaaatccgcttttcattccaaggaacaacatagaggaaagaccaagccatgccgctggggattcgcatgatctcaaagcttttttggccaccatctctgaaggctttctgcccttttttcttttctctgcaaggtgagacatcaaagtctcccattgccatgttagagagctaaaagggaaatgctgacctggatccctcaaagtgtaggtggatggaacaatggggcttctgggagaatgggcttcacgtggttggcctgtttgacatctttggcttggagctgagcaatgaaatgtggaaaaaaatcagctttgaaagtaaacgagctcagtgcccagcccacgctggggatgctgggagggatagggttgtatcacttgattcattcctccagcttatctcaagtcctggcaccatgaggcctttataaatgtttgttgagtgaatgaggggactgattgattaattgcttaattatgtccaaacggatgataaattcaaaaagaatcttggctaactctttagaaatgcttgatgaattaaaggtttttctgaactcatcatcgccccctgtgactgtgaaaggaagcctttcacccaggctaagaggaatggacacgtctcttttttcttaggtatttcactggatttcatttacactgtaaataaaggttaatagcctaggccttaaagttagacaagtgaggttcacactgggcaggtgagatgtgtgcccttaggcaagtcacttaacttctctgagcagtaattttctcattataaaaggaagataatagtagtgtcttcctcctcagaccattaaaataatctctctgaatggcatggcacagtgatagacatgtaatagccttcagtaagtacaactctttgggatcagtgaggattaagttcaactaaaggaacataaaaccccttagtaatggcttaaacaaggtagagatttgtttttctttatgaatctacaattaggaaatctatagttggtatggtagttctgctctaccaagtgctcagagacccaggttgatttggctttgttctattatccctatgttgtggccttatcccagtagtctaagttggagtggcagccattatatacattttctaagaggcagaatgaaggaaaaacaaaaaatgggaaagggcatgtgctggttgcattttaagggaagtagccatgtagcacttttgcttatatcacgttagcgtatagttgggtcatgcttttttttgtttgtttgtttaagagacggagtcttgctctgtcacccaggctggagtgcagtggtgcaatctgggctcactgcaagctctgcctcccaggttcacgccattcttctgcctcagcctcccgagtagctgggcctacaggtgcctgccaccacgcccaactaatttttgtgtatttttagtagagacggggtttcaccatgttagccagggtggtctcgatgtgctgaccttgtgatccgcccacctcagcctcccaaagtgctgggattacaggcgtgagctaccgcgcctggcctgggtcatgctttttaaaaaaatctaccagtctctgttttttgctgctgttgttgttttgtttttttgagatggagtttcgctcttgttgcccaagctggagtgcaatggcacgatctcagctcactgcaatctctacctcccgggttcaagccattctcttgcctcagcctcctgtgtatttgggattacaggcatgtgccaccatgcatggctaatttttgtattattagtagagacagggtttctccatggctaatttttgtattattagtagagacagggtttctccatgttggtcaggctggtctcgaactcttgacctcaggtgatctgcccacctcggcctcccaaaacgctgggattacaggcatgagccaccatgcccagcctcagtctctgttttttaattggtatatttagacctcaggtgatctgcccgcctcagcctcccaaagcactgggattacaggcatgagccaccatgcccggcctcagtctctgttttttaattggcatatttagaccatttacatttaatgtaattattggtgtgccaagtctgccattttattttttgttttctgtttgttctgtttttagtttccttgttttcttgtgggttacaagaacattttttagaattccattttgatttatttataggtttttgattctttttctgtatagcatttttagtagtgcctctaggtattatatgtgcataacttatcacattctactggtgttgacaatttactagttaaactgaagtgtagaaacctcacttccctttatgttcctttgccctcccctattacaatataattgtcttaaatatttctacataaactggaaaaccacaccagacagtagttataatttttgctttaatcaccaaacataatttaggaaatttaagaaggaaatatattttcccatatttttactctttccattgttcttcctttttctgaatattctaatagtcattttctttttgtttagaggatttttttttagccatcttttaggggccatctgctagtgacaaattttcttagtttcctttcatctgagaatttcttgattttcccttcattccaaaggatatttttggctggatatagaattctgggttgacagatcttttctttcagcccttgaaaaaaaattgtgtcacttccttctggacttcatggtttctgatgagaaatatgcagtcatttgaattctttttcccctgtaggtaagtcagtaaagtattgtttctctcttgctggtttcaagattttgttatttccagaaatttttctatggtgcgtcttggcatagatttctttggatttatccagtttgggatcttctcaccttatttaatctgtaggtttctgtctttttccaaatttagaaatgtctcaaccattatttcttcatgtattttttaagccccatcctttctctccctcttctttttgatatctgattatacaagtgtttgatccctggggctctgttcattttttttttttaattctgttttctctctgttgttcagattgtgtaatttttattgttctacactcaattttacggtggaacccattcattgaattttttattttggctattttttcctgaaattttcatttggttcttttttctttgttttttgctgagacattctagtgtttcatttctatcaaacatgttccttattgttcataaaaacatttctagcatggctgttttaaaatccaaatcagtggtggcatcttttgattgtcatttctcatataagttggttttttcttattcactgcatgatgagtggttttctattgaaactggacattttgagtattatgttgtgcgactctggatcttattgaatcttctgttttagctggcttttgatactgctctgacatgggaaggggaggcattgcattgttatggccagataggggtggaaatccaaattctctacttggcctccactgatacctggggggaggggatctttgttactgctaagtaggtgtgggaatttcagctcttcacttggtgtctgttgataccacctggctgggagggcaagcatgccttattactgtttcccacatggcctcccaacacctcagggtagaaggggcaggggtggcttctttactgctgggtgctggtgaaagtactgacattccatagaactcctctgacatcactcccacaattatgtcacaggggaggggtaccttttatctgttgccaagtgggcgtggaagaccagccactccttacagtctctgctgacattgtatggagggacttcatcactactcagcaaagttcagagtcctagctccctacttggccttctctgatactactccagcagggacttggggtactttgtctaggctccctattcagccagtgctggtggaggtggggggggccagatttttttgtgtgtggtatctcgttagagtcaagtgattattgtcttcaagttttctgtttactaagctgccaggttggagatatatgaagcaaaaggaaaacccagagaactcaccaccatctgtgtcattcctgaggtcccaagtcccttgccagcctgccttctgctctcctgcctctgagagtcttctggtgtttgttttgtataatgctcaaggctttaaattcaactcagtgtgatgaataagcaaaagcacatctacgccatctttccataagtagaagtcctctagatagctttttatgtatatcatcaggtacctcaatggttctgacagagcgacttgagccacctggtggtttgcaccatcgtttgctcatgtatgattacctttcaatctcttagtgagtatttttagtgatactgcctggtgcccatcagtaatgttgtagaagatgctctccaccaaggggaaaaaacagcccagacagggcaggaaatgggcacagatgtgccttcccatctccacagccagggaatacgtctgcagatcctagaaccaggcttctcgaacacgaggactattgacaggctgagagttcacttgtcaaattagccattgggggtgagagatcaattagggaatgcttcattagggtgataaagggcattaaagaggatgttacttggccctgtacacgtgtgcatgtacactgtggctttctgggaggcatttatcttagaggaaaaggtattttcagaggcttccctttactccactgtattgatttctcactctttgtcagaagggaatgagataggaagaaagttgttcgttttctctttaccagttaggagaatgacctgggcatctcatagtagtgagcctgacattctgcagaatgtttcctgaggcttctatggggtgagaagttaataagttttcatgatcaaacacatttgagaaatattaggttaaaataagtaaaataactttctgtggaacctttgaagaacctttaatatgctgatgtacattgcaaatcttcagtgtttttcaactttaccccgtcacggatccattttgttatggagcactgctctctggactggtgtcctgaagaggcagcttatgggatgtgctactgtaggcgaggtggagcagttcatacgttgaacagaaggagtagtggtggtccttctaaccagggtgcacaggcaacttttcttactatctgtggccacttctgtccctttagaaaagataaagccaatttacatttgtcacttggagaattggagggctatgccttagtcagatccatgtcccctgcaaactcttacttcaaaggaaaggaaaaacctcagaattctgccttgggtttcctccaaagagccaagtcccccaggttacccagaagcatagactcactgcagtgagcaaagactcaggctcatattttctctctaccttctcccagtcccagccttgtatctacgttagaattgagatctctttatatttggggatcttttgctccaagtgctttgatttttacctaggacaaaaggtttatacctttagcagcttgtggggcagtggggttttcaataaattaatttcagatccaaattatgcatgatgttgcattatgtaaatgtgacttaggccaggaaaaaggtttggatcactattagctgcagacaccgaggtgttgacggtggttggaacagtcttgctttgtctgagtaggaatgcagcctccaaaagctgactgttgatagggaagacttcagtgtattgtccttttgttaaggaaaatatgtggatgtgcttggcaaattggtccctatctgactcgcagacacagggttgattggctcaaacactagctgctgacgctaggttaccaaaaactgcaacttattgtgcacactgtcattactttaaccaggtcttggtgaagctggtaagccaaactgactgtcttcaactttgtcatcctatctgattcttagagctgatttttagatgattccttctgttgatgttcctgaggaaagcattctttttaccatgagatgtagtccaaagatggcttggtctgagattgctttgaaggttaatttggaaaagcctcgatgagcttataacattcaagaagaacgttctgctgatcatgcttattttctttgatccttgttctcagtttgctacatatttcaaactaagttttagaattcctgaatgtccacaccacccaaggtaataactaacatttatagtgcattttaaaagtaccaagcattgtgctagcctttatattcattacaaatttacattcatcacaaatttaattccctcaataattccatgaagctgtcttgactttattaatgaggaataaagtgattgaggaacatgttcgagtttgcacagccaatggagctctggggctgggatttgacccagagcctatgctgttaactcaacagtccctctctcaggatgcacctgagcatggccttgttctcagcaatgagatgtgtctgccaggcaggagctggacctagaaccctaggactaggcagaaggggtagagagtcatgcccacctataggatggcagcaggcagaactcaggaagtgcagggtatggccaaggagccagcagcatagggaagtacaattagaagtaatagaagcagaacaaaatgatggaaacattaagagtctatgttacccagagctctgaaaaggctggcagcatcggccaggcacggtggctcacgcctgtaatcccagaactttgggaggccgaggtgggtggatcacgaggtcaggagatcgagaccacggtgaaaccccgtctctactaaaaatacaaaaaattagccaggcttggtggtgggtgcctgtagtcccagctactcaggaggctgaggcaggagaatggcgtgaacccaggaggtggagcttgcagtgagctgagatgacaccactgcacttcagcctgggtgacagagcaagactctgtctcacaaaaaaaaaaaaaaaaaggctgggagcatcaagggagtctgtcaaggttacagctgggtggctggggttcagagtaggaccccatgcatgaacttgaactaaggggccaagtagttcaccttgatggagtctggccgaaggaagacatctgcagccaataaccagaactagagttcaaggagagactccacactgaaggcaaaagttgagctaaaaggaaagggttagaatcagagtcaaagcaacattcatgttggggagtcctggcctgcaaggcagaaatcccaacatcccctctgcccaagagataattaacttcttgtgctgatttaggacaagcccttcaggcagactactagcagcctgtgcctgacgttcagcctgtcctagagccaaagataaaacgcaggcctgcatatttaagaaaagccaaggatctgagtattgtctgacagtctgtttgtagagagagtaagacagcaaacttgggttttgcaataccactttgctgctcaaataaaatacagtccactgccacagtttacaggttgtaatatttgttaaaagaatttgaattctgcaaaagcacctgaaagctgcccaatatgctttccattgctgtgtgaagcctgaagagtgcacatggcagttgtgaatttcaagggttgttcagggagagaaaatcgttacttgtccatttgccaaataattgggaatttagctaagtcaaagtagcgggtgggggtggggtggggctgaggattcctcctcccctccccattggcccaaatggagtgaggggtgggcgacatagcttgatttgaggcgacttgtcagtatcctgctgtgcattctgaacctggcccacgtcagccgaagtgatgtcttatccagacacacactatgggaaatgtgaactggattgaaatcagagcagggatgactatggggacattcagagccttctgaaggtatttttagaatgcttttaacctgaaaaagggaaagtgccacctttctggagaccgtagagctgagaatgactcacagcgaaaccaggctatacctaatttgggggaagccccctttggctgcttccttgggtccaggtgggagtgcctgttcttaagctctgggaatgtgacataccggggtaggtgtcattacagcccctcacactctgagtctgaaactaggacactcacagtgtcagggaaggaaataattattccctatatttctgagtatggtttacaaaacacatggatagattttctatcactgatggtattggatacactgggcaggcctgctgtcttccacttttctgataaggatcttgacgttcaccatgtgccacgcccacacagctctagagtagactctcagcccatatactcacctgtaagccaaaaaaggtacacgtggtcaaaattaccccgcaaaatgctgcaagtcatccccacgaggcggtgcccagacactttgcccccgaagagctggaagagattagttccttcagtggactaccagccaaattcaggtgacttacatttagaggtcaagtttcttaatactcagcctgctgagatgcatgcacgcgggacacctgcagaagctgagggatcagcaggttcgagtctccccttccacgctcactgcaggtatttgctttctgagtgatgtggcaggtgaccatttcagttgttgactttctctttcttctttgtgagaaatgcacatagttgaatttgctcaatttaaatttgtgtgtgctgtggttttcctggaagttacagagcaagcatttgagccaaggccccctgacttcaaacctggggctctttgtaccataatcacatgacctctctgggtccagtgttgcctggtcaaggaaacattcatctactaacctttcagccataataacaaaactaataatgatgaggatgtcaacagcaagtattgagatctcattttgtgctaagtgttgcacaagctttattctatttgcttttcaaacaacaccttgagacaggtgctctgatcatcctcatttcataggtgggaaactaaggcagaatgattgaatagggttgctcagcttgtaagaggcaggggcaggatttgaagtcagatctagcatctccaaagccttcaccagtttgctcttctgcctctttctctatcttttcctgaccactgagggatgtgcccacttactcgatgaggaaggcaggcctttcagaggctaaaaggagccgaccctagtactttacagggctgggctctctggcttgctctcatcacaagcctgggaagttagtagcaaatggccaagtcatctcactaaataaagtttccaagaaagatgacattgatgccaagtgaacaggcagccagcatgtcttctcccagggctgacaaagtactcaaattctttcttgtgtactctcaaggaagctcattttggtcccttacaggagggctgtcccagcattggtttttctccctgccaaagctgttattccaggctggcttttaaagtgagtgagctctttggagtattctgctttcagtgtgataggccattagaacccagtcgcagtggtactatggatggagctcagggaagtctcagaaatgagggcaggaggtttgatccctataaaaggggaagcaggaccactcagggtagagggaaatacactcccaggcggcaatgggctgcaaatgatgcatttaatgaaagggccacctgctgtgctgagagagagatggtcaaggcaaggcaaggaatcacttgctcagtgggaagcagggggtggtcactgcttctgtttcaaacgtcgatcctggtgtccctttcacttctcttctgtgttccagccctgattcctgaactgccacctgggtcccaagtcccaaattgtatttttagagtttttttttcctcactactagatccttcttatctggaagtccagctgtagggagcttaggaccctctttcttagggtcagaaaaggtttgagttttgatctttccaaattactggagaattaatttcagcagatgtttccagcatctcccgcatgaaatcagattgctgattcccaagctacgtgtaagggtgggtttttaagaatggcaggtaatttacagggtgatggctggatcctgctccatatccccagatcctttggagaccagtagataagacctctcttatgcagatgtgaactcttgttcaagttcttgttcaaggtcacaatgcattagtattaaaacacagcaggaggtagtttacctgactcttaagtcagcctttcacctccttcatcctggtgcctccataaggcaaagaggggccagggcgattaaaacagacattactgctccattactccattcaaagtttgtacatccctatgtgaggtaagggtgtgtgtgtgtgtgtgtgtgtgtgtgtatgtgagtgaaatagaatgggatgggaaattgttcctcgatcccagtctgggacagagaccattttttcttccttagttagacctttgtttaggcccaagtgttctgcatgtctcagagaacctgcacagcctcacagctttatccttatcttattttgtatttaacctcattagccatttgtggtcctggcctagaccagatcatggcaagcacacaaggcatctgtgatgtttttctctgccgtgaagtgcctggtatagtaattaacttagagatctggactacaacaggatattaggggttggagcggggagcagattcagaaaaactcttgctaatttgcagaggtcttcataaaacagaaactaattatttgttgatttgttgctcatataaggcatatttataatatccaattgcccatcaaaatgtaatggtgtgaagagcctggttttggcatctaacttccaggttgaaatcccacacactggccacgtgatggtgggcaagttattttatcttccagaacctcgatgtcttcatctgtaaaacaggaatgatcaaatgagaattaaaggagatacgcagtgatagtacttggcatagttcctggcatagagggaagtcaacaaaagtagagggtctcatctagcctgctgcagccatctcatgccatcacatccactgtggctagagcttagattctgctgaagtaaggaccagctaacattgaccatctcacctgactcgggagagaagaatctgttggaatttgatcacaagtgtgtgctgtcagatcgtcctagttcgggacacttttgtgtaaccagattttaaaaaccattttacgttattcatgcccttgatctttcaagctgtggaacatcaatttcctcctcttcactttcaccactgttcacaaaagtaggtaaacggtggccccttttcccctcccagtttctttgattctgtggacttgtgctgatagccactagagggtgtaccaggggtctctggagtctgggtctcttacagatggatttgaaaagtcaaaagtcaatcattgcagagccctcagaggtgaagagccagactgcagtgcagatgcaggaacagaattttagagctggaattaatcaaggagaattaccacaagttgaaaaaaaaaaaaaagcccatgttgtattctctcataagtttaggctgtatctttttttctaacaagaccatttacaataattttaccgccaaacaatcattgactacaaaatgcctttctataagcaatcaaataaaatctgttagcgtcatttcctcttaatttgtcatgcaattagtgtgtgattagaatttcccaggctgtgtttcttctgttttaggagatcggactagcttgtggccatggaatttagagttaaggagatctggctttcaaatctcagtttcctccacttaatagctctgtagcttttggcgggtcatgcaggctttctgtctctgttttctcctctataaaatgggaataacgatactgctttaaaggacttctgtgaatagtagatgtacactgagcacagcgtctgggataaggttttccaataaatggcaggtattgtgatttttttttttttaagtaacactgttagtcacaaacatcaccgatttgtcttggagagcagtttatgacttctaggatataattaaatgtgtcagctccactactgtttaaattttatccactccgtttccttgttaaacatttattacattatttaaggaatatacattttatactgagcaccaatgccaaatcacaattagtaacaatttttatacaacacataaccgaggtcagggattgtttatgcgagatgacgacagccacagaacaacgtgcaaagaaaatattatgcctgcttggccattcctaacatttcaagtcaaggtgttgcatttaattactctctagaaggtttaatctcagacttattaagagcatgattttgtgaaggcaaacaaacacctctgctagcagcaccaaacatgtttattccaaatagttaattaaattgtgtcagttcctgccctggagctttcaggctattctgttttttctgcccgtgtggacgttttgtcatcatcattcatttttatttcctcttcggccttttaaaaagagctctgagcagcagcccaagcatgtgtatagttggagcattttgcaaagttaaattggttaaatacgggcccggcattggctgctgggaccatctacatttttcaaaatccactgaggtttttcagtggcatcaaaacaaacgtgaacaattctgaccctgaacataagcagcaatagtgactgaggcctggattactctggaaggacttggagctgcatggaaggaggacctgagattggaacctggtacgtggagatatgatggctgacttccaaagctggctaacccacacctcatcttctttccctgacctgcaaaaacagacaggaacgaatcttcttggaatctttctctaagaaaaaaagggggcttcctttttggcttcaggcgtacagggcaccagccaaggagggggcagagagaagacggaggaaaagggaaaggcacacagctctgttttcatggcagtaggtggggtactgagagagtcaacatcaggagggttttacttcttagacatctaaggcccagggatacttgacagctggcgcaggttgcaccagacaccctctactgaaaagcaggaggcccctggtatctctatactctcatcctggccctcttcagctggattagagagaaaggggcagagggccaagaactctcagatcagtccatagaaagataaatacttgcaagtcaatactaaggataaaaccacctaacctcgtggatagtgctgtaatgtacaaagcaccatcaaatattgatttatggccaggcgtggtggctcatgactgtaatcccagcactttgggggttgcagatgggcagatcatgaggtcaggagattgagaccatcctggctaacacgatcaaaccctgtctgtagtaaaaattagccaagcatggtggcacgtgcccatagtcacagctgctcaggaggctgaggcaggagaatcgcttgaacccgggaggtggaggttgcagtgagctgatatcgtgccattgcactccagcctgggcaagagagtgagactccatctccaaaaatttttaaaaatattttaaaagatggatttatgtgtttgtcaaagtcctgctatgtgccagaccctctgacatttttttctgatgtgtggctggaacaaatttggtgaaaggtgtatctacccaaagatgtatctagcctcagaaatagccctgtgctggacccactgtgggggctgcataggagtatcagatatggttgcatcttcaaggagctatcaatccagtatgacagacaataacaattgacatttagcaagcacttactatgagccagacactaggctaagtagttttcttgtattaactgcagaccacactgtgagataggcacaatcactatctccatgctacagatgaggaaacttaaggcacatagaagctaagcaacttgtccaagttcacacagctagtaagtggcagctccagcattctgctgcataaaaagataatgggttggtaccctgcatttaaaaatgtacttgtaaatatcagctaggcaaatatatgtgcaaggtgaggcctaaaagccctcaggattatattggtttgaaggaagaaggggggctctgtgagctgggtgtttggcacaggtgtcaactgggggtgtgacttgggtttggaagagcttagagaagcagggagagcatcctggtgggtgagaggtgtgcaggtagcagtggaggcaggaggagccgggtgatctgagcaggtggataacagagaagggggtgtggaggtcagaagggatggctagagccagctggcttgtgaagggccttgaacttcaagccattgtcatcaaaccagaaccaggggaaatgaagtgatgaaagccctgcagctgatggaatcccgggaggcatcaggctccgtcagggcagtagattccctcgtttgaaagagaaaaccgccattggttagcaggaacatgggccaaacactgcgtcatgtattattttgcaacatcaccagcctgtgcttaagagggaatacgttttgcggttaagaacaaataccttgcagcctggctgcctgggtttgaattcttgttttgccacttattaattgcatatccttagagaagtgactcaacctatccgtgcctcagtttcttctcagtactgtaaaatggagagatattcgtaatacattcctcatgaggttcttgtaagaatcaaaagtgcctcacatgtgataggatctcagtatgtgttagctattattttttttgagacagagtattgctctgttgcccaggctggagtggagtggtgcgatctcggctcactgcagcctccacctcctgggtttaagtgattctcctgcctcaacctccagagtagctgggactacaggttgtgtgtgccaccacacctggctaatttttgtatttttagtagagatggggtttcaccatgttggccaggctggcctcgagctcctgacctcaggcaatctgtccgccttggcctcccaaagtgctgggtttatgggtgtgagccactgtgcctggccagtgtgtgttagctgttattgttgttgttgatatgttatcatcttcagctttgagacttgagcattattccagagcccagaagctggcaggaataggttattactctgcatgtatgagtatgcagttttatccatacagagcatccctctctgtttcttagccatctgaggtcattagctctgttaacgggtgacaaggagcccaatgtatgtggctgggccccttagctataaagaagttaattgtagctgatttactagaaggctaataacataggtgtgcttccttttacatggagagcctcattaagtggaggtctgtgggctttgcctgcagctttgggcatctctagcatctgcacatgtataccttagaagcaacattgacctgggaagaaactgacacgccctgcaatgtctctaccggaaaggcccctgtcctcagcagacctagtgggcatcgagcaataataaattgtgtttcctctgtagtccaggagacaggaagctccaaattggactctaattaactctgaagaaacaatgggtttctccagagcacggcaattctggtcaggtctaaggaggtgtcacgcagccttggaaaataattacaaccataatgacgatgcctccaaagtcgggcttctgatgatgcaccttgaacaaatgtgtgtttctccttcctcacaaggttcgctgcccttaattgctaccctccttcattaaggggcaattaattttgtgccttggtttaaaacggcggtaattataaggtgaagacaaaaagcccatggttaaacataatcaggctggatgtaaaaggtgctccctggcagattaaggaaggtgggagggaaggagcatgcatcgtcccaggcaggcaacattttccgtcttgctacttcttttctcaattcgtaactgctgttgcagggtagggcttaggacaaagcccgtctttttctgcccaggttgcaggactttgcgtcttgcgggtcttgggttttgaggtcttggccattgggcattctcctgccatagaagtcagcccgaaggcctggactgagctcagtggcccagggccttgggtggtggacatggcttcccaaagagaccagacccttcctgaggattcacatgttaggggcactttttatttcagtgtcattctaaacacaccttccatcattcacttacttgtcaaacatttattgagagcatctagacgctgtgctagatacttgggatgaaatggtgaggatgacaagcatgttccatgcctttaagagtttatactcaggtgggagagccggatgttaatgaagcaataacccaaataaataattagaagcagtgaaacatttgcaaaaggaaaagtacagagactatgggaacgtaaagcaggggccatgacagtaatgaggaaagatggccccgacaaagggacttgggggccgagatcgggagtggaactcagcaaggtaaacatgggagggaaggagcattctgctcctagggaagaacatgtacaaggaccccaagacaggaacgagtgtgaccttcaaagaatggaaaataaagggcacagagctgggcgaggtgagtgtcacaagacaatgggaagaagcagagataccataatggccctcatttttcccatccataaaataaaaatggtattcccttgtctcatctacaccatggagattctactatgcaccttgcttttctcttacagtggagagtcaaagctggaatcatagtccttaactcacactacttactgttggcagctgagagaataggacattctactttgatatttctgtattttctctccactttttgccatggagccatgtgactctgcccattgtgagtgctctctcactttctctctccctgatatatattaatgcatgcatcacacacacatgtgcatacatactgtttttgttgttttttttcgttttctggctctgtcacccaggctggagtgcaatggcacgatctcggctcactgcagttccacctcccaggttcaagtgattctcgggcctcagcctcctgagtagatgggattacaggcatgcaccacaatgcccgactaattttttgtattttttagtagagacgggttttcgccatgttggctgggctggtcttgaactcctgacctcaggtcatccacccacctcggcctcccgaagtgctgggattacaggtatgagccactgcacccggccaatgcatacatactatttatgcaaacaaagttgaaatcatactgcagcaatgtagtgtgagggttagggcatcgactttggtgtcagattgagtttatatcctagctgtactaacctttagccacataacttgatgatggtatttaacctctttaagaatcagtttctacatcttcaaaaggaaggtgagactgtctatctattggtggtgtttggattaaatgacattccatggaatgcccttagcaaactgtaaatccagaataaatagtaacaacaattacattgttattactgaatggcatggtacagtatctggcacctagtaggtgctcagttaatgatgatatacttgctaaatgtttcataatctgcttttcagctgaagatagtattaataaggtttatttgggttaaagtggcagagacacaacttacattaaaaatagggacttactggctattaggatccaccctcctttcctatctgcttccttttgcatctcagcatcattctccctggggcagatgggctcccttcacatagcaagaaaggtggcctctggcagctccaaagatatattcttttattactgaccaacctggaaagaaacattctcttccagctccaatttgaacaatctccatcacagattattgactcagcttggagtacatgcctatcacgtggaccaattactgtggccaagacctgagttggagctattgacagtctccacctcatggttggagtgaggagtaggtgtgggggtaggagcaggttttcccatagagggtggcaaagtttagcagagacatgaacattagtgaaatcccccagttagggcttatgtccagagtgtagcacaggctcaccctatgggttctgttgacccagcttggccagccatgcaagtgccaggggtggcgcaccatagtttgacttggaacctagtcattccaggagtcccagtttatactctcagtcttagagctaatgaactgctttgctatttcactgtgtctctgggctgaatccagtgggcagtgacccaacacctgagtgatttgtgggcctgaaggaagacgagagaagctgattatggagtcagcaattactctgcccaagtccctgcttggcagggccttatctttatttatagctggctgagctacccagagccctgtttttacccttgagtgactagtgcactgcagttttagttcataaaacactgtttgtttataatccttaacggattctgttttattaaaagagaaggctccatccagagtataaataaagttaactggttaagttttagcttctattcacagtgaatgtgcaatggatgggaaatcaccgtggaattatgcaccctcatgacctgactttatttatttatttatttatttatttatttatttatttatttttatttttatttttatttttattttttttttgagtaggagtctcgctctgccgcccaggctggagtgcactggtgcgatcttggctcactgcaagctctgcctcccaggttcacgctattctcctgcctcagcctcccgagtagctgggattacaggcatgcgctaccacgcccagctaatttttgtatttttagtagagatgggttttcaccatgtaggtcaggatggtctcgatctcctgaccttgtgatccatctgcctcggcctctcaaagtgctgggattacaggcatgagccaccgctctgggctgagatgttaacttttttttttttctttttttgagacagagtctcactctgccacccaggctggagtgcaatggcgcgatctcggcttactgcaagctccgcctcccgggttcaagccattaccctgcctcagcctccagagtagctgggactacaggcacccgccaccacgcctggctaattttttgtatttttagtagacacagggtttcaccgtgttagccaggatggtctcgatctcctgaactcgtgatctgcccaccttggcctcccaaagtactgggattacaggcatgagccaccacacccagcctgacctgactttatcaaaaaacaaaaaaaaaaacaaaacaaacaacaaaaaaaaatcttacagtctctgaggtctcaggcctggacaaaaccttttcaaagatggggaggtggcaaggaaagaggcagaattaagatcctaaaatcagctttgttgcagtggatttgctttaagtttccttttgtttttgtttatttgtggggtgatgtcgtagtcagtatgtctttgtgtatagttccatgatttgggggtcatgtcggggtagacctaattctatttctattctattttgagggagaaaggatccccaaagcaaagggaatagtgaaatcttcttggaacaggtagcatcgagctgagtcttgaaggataggtcagattctgatcaatatgggagcaaaaagaaaggaaaaaacgtaagttgagtttatcgcattgtgaaaaggaattgttttggatatgacaagaggattagtttgcatagggcatgaagatgacaagatggagattggattcaagggtagggttctactgtagggtgatggccagatttaaagagttttatatttaatttagaaggcagtgaggaaccactgaggttttgaatgggagaggggtatggttggtctaaactttggcctgcattattcttttttgagagagggtctctcactctgtgacccacattggaatgcgacggcgtgatcatggctcactgcagcctagaccttctggactcaagagattctcccctcagcctcctgagaggttggggctacaggcacacagccatgcccagctacttttttctctctttgtagacacagggtctcactatgtagtccaggctggtctcagactcctggcctcaagtgatcctctgcctcaggctcccaaagtttaaggattacaggtggatgtgagccaccgtgcctgaccgcctgcgtctttttttttttttttttttttttttttttgagttagagtttcactcttgttgcccaggccagagtgcaatggcgcaatctctgctcactgcaacctccgcctcccaggtacaagcaattctgctgtctcagcctccgagtagctgggactacaggcacacaccaccatgcctggcttttttttttttttttttttttttttgcatttttagtagaggcggggttttaccatgttggccaggctggtctcgaaatcctgacctcgtgatctgcccactttggtctcccaaagtgctgggattacaggcgtgagccaccgcacctggccccggagctctttgtgagcacaccttcgccccatctccagctgcctgtgccacttgcccaccgtcaggactttattttagtattccctggactcttgctccccagtcagccttggttctagggccctgcagagattcctccaccaggaagaaggacccatttctggctgtgatgaaggccttggagaggtggcagcaggccagcccgcccctccctactgaggcatgttagctgcacttacagtgtctgagctgcggttaatatatcaatatttgctcgcgagggtatctggcacagaacaggttcctgggatgctggcagatagattgctttctcttgtagcattcttcagcggcattctgttttggcagggatggaaggggttactagctgctggcaagagtggaaaaggagtccccattcttcccagaagtgcctcagtctcacaatttggccctgtatgatattgtcagcacctcgtgttccctccatcactaactatttcctggtgtattttgctcattgcagtttttctggaattctgttccttatacccatgttttgttttgattgctcaactaggagcccctgggggggtgggctagtgctggaaggagtagagcttagtagctgagtgtggggctgggatcagatggcctgggatgaatcctgctgttgctggctagctgtgtaacccaggcatgctccctgacctcttgatatttcagaggtctgagaaactaggatgatgatgatgctggaagagctgtaaggattagataacatcacacataaaaagtagtttgcaaaaacttgatgcgtagtaaattctcaataaatattccattttgttaatcaccattcttctcattcaataaatagtgcttcttggatcctttggcctaccctaagtttcttgaggacaaggaccaaaccttgtatttttctgtagttctgtttctaagagcacagtgctaggtacacaagaaagtcttccttcaactttagggctttgagaaaacaatcttacccccaaggctggtgctcatggcactgggcagtagtacccagggagaaatcaccagtgacagaggacttgtctccagtcttgagacatgctggtgaaaagtgagggaaggaactgtgatctcttcaggaagctgagaaaagagggtctgggcctggagaaggtctccaagaaaggctggagcagtggggctggatgtggacatcagttgtccactgccatcagtcatgagcaacctcttaggatagtcctggagctttcaagtgatcactttaagacttcgaacaatttccccatgataatatcacttagggcattttcattgcgaagcacttgcttgactcgcaagtcagagattgtgggatacccagaatgtgttgctggatatgccatgcaagtgtgccatgcgtgggggcatgagatagcacgagtggaaccacagaggggagaacacgcaaggctcgcagtgccatcggacaagctctatcccagacgtcaggacagagcagttgcaacgtgggaacttaacatgtgccaggctctgacataagcattttctggacattatctcatttaatcttcccagcagttctataaggcagttgtcttagatcactttcccagaggcagaacctgaaccagggattcttgtgcaagggatttgtgtaggaagtgctctaggggggaaggggttaaagaaatgggggcagcaggagaagacaggggaggaagccaggcagatatgtggctgcaggaaaagtctagccttagcctgacaccacaggaggacccatgcgaatggcaccacagatctgttctcacttgaggcaagggggcagggcttccgctcttttccgtccaccagtcattggctgtaggtcacatcgcccaggacagggtggggtataagtcccatgcgtttacgggagagctcccatattgcaagggctatattgagctgttagcagccaaacttcacagcagccagggtcaaatgcaccaacacagaaaaggggaattgggtggtgtaccaacagcatctgctgctattgccccattttccagatgagaaaactgaggcctagagtgtttatgtaattggcccacagatgtgctgagccaggatccaaacccaggcatctatcttgatagtttttggttttgcatgactcccttctctgttaaatcacatgtcccactcaggggccaggtgagatctagtaaatgagagagaggtgagacaagggcccaggagtcctggagatgaggaaaaggtcataaaaggagcccacaggtcaagaccagactctaggctgctgtggtgtgaccaactcatcttgctttgtgagggactgcgtgtttggctctgaaagtctcacatcgtgggaaccccatcagtccttggcaaatggggatagttggtcaccctaggtttctgggtgggagcaaggcaaggatgtgagggtctctgtggcgctatgtggcaccgtatgaggcagtttaaaggtaatcacagttgtcattccccagggcaccaaagtcagagccacctaagcaagtggccatttgggggatgtggatgaagggacgtaagccaggaaaaacccctgtcaggagggtatcctggccaggagctgagcagagaaggtggtctaagatccagggtgggctaatgagaggagagatttgcattgataggagaagacgaggggaataagttaccagccccctgaggcctcctcagggatcttgccggaaatagatacccttcccctgcttcccgctgtgaagcaaactgtttctctctctctctctctctctgtgtgtgtgtgtgtgtgtgtgtgtgtgtgtatgtagatagaaagagaagagggggagattaattgagagagagaaggggagaatgaacattggaatccaatgaggaaatgtccttgtaagttcctatcccatccgtagagttgggcgaggtaaagtaggttcctgtgcttttgaaaggcctgatggtctgaatctaaggagtcttccacagaagacctgtcatgagaagctgtcgggaagtccagatttaagaagctcatgcataatcatgctcgccccttggtgaagctttctgggtaagagacaaagaaactggccaggtgtggtggctcactcctgtaatcctaacattttgggggaccaaggcaggaggatcacttgagtccaggaattcaaggccagcctgggcaaaatagggagaccccatctctatttttaaaaattaacatataaaagaaacacatagggtggctaggatctaaagtccagaggcctaaaagcagaagtgggtcccagatccccagtcttgctccttgcgttataatggttcaactcatacacactccccacccccaaacacacacaacctcctcctagccagaagaataccctggcccattctccaatgggaaagcaaatccaggcccataatgaggcattgaggcattgggcttgtttttaggcgttgaaagatggggccagaggtcaccaagtttaacatccatgatggtcaggttagcagtttccaccatagccttgttgacatgtgatccagactgacccacgacgggactattgtttcctgccatttctggagcaaggttggtcaagggaccgttcacagtcataggagcggtaacagcaaagttctggccaccacctccaccctgtccagaatagaggagctgctgtgcttagtggcaggagtcctttgtgagggagtggctggggctcagctgtgtgggtctgtgggagatgttgggaaacacctgccctttaatgggcagggtagcaggcacttcaaaaaggcaatgccctgactcccttttatttgagtctttagaatcaccactgctgtttcagtctcgtagttcatgctactttttcttaagtttcccatgttgacggaaactacccacgatttctgaggcctgatctggagaggcgattgtccccctcccctcaagctggcttctgactgtgatgtccagtctagctcctatttggtaggaaaagagagaaacaactttatttctagttctccccttctggttttctgacctatttccttatgttcaagagactgtcccaggagggagcagggttggaaaagaaaggagtttgtgtatccgtgtccgtgatatagagaagtgatctgtaatgtgaggggtggtagagacaggacgagatggtgacactttcttctgtgtaccaaggctgtggcctaaagtttcttctcaggttccttggggcaaagtgattctatcctacttagaaaaaccttcctggcctgccattggtggtgaaggggttgtggggagaaggatcttagaaggacaaggctggaagcaagtttagagctcatggagattgcctagttctgtcattttccagcttccagtattttgcgacttcctgatgttttttgtgtgcatcccacagaaagagatatgtataatttatatcatgactcaggaaacagaagcatatataaatattggaagaagagtgtcatgaaacaatacttgtcctcactaccactgataaaaggcatgactgatggtgagggtaagtattgtttctgtgttcctgctagtttctgtgctatttcatgttttgaaagtatttgtgctaacagctgctaaattggtcttatgaacccaggaaaagagaacaactcatggattaaaaaaaaacactgatctgccgggtgtggtggctcacgtatgtaatcccagcactttgggaggccgaggcaggcagatcacctgagggcaggagttcaagaccagcctggccaacatgctgaaaccccatctctactaaagatacaaaaattagccaggcatggtggcgggcacctgtaatcccatcccattgactcaggaggctgagacaggagaattgcttgaattcaggaggtggagattgcaatgagctgagattgtatcactggactcccaccctgggcaacagagtgagactccgtctccaaaaaacaaacaaacaaaacacactgatcaagtccaccctctcatttgttagaggggaaaacagatgcgtggtgaagggaagtgatttacccagtgtcacaacacatagtccatgtatatttatagagcagctactatatgtcagaaactgtttggacactggatatatagtggtgagcaagacagctgtgctctgccctgaagatgcttagtcttgtggaggaggtaggccttatgaaaataaaacataacaaaaacctacatataaaattctagtccaagctgcaataaatgccacggaggggcctagccaagagctctagtggaccagctggggcatgaagggtcagggcctactttttttattattagtattatactttaagttctagggtacatgtgcacaacgtgcaggtttgttacatgggtatacatgtgccatgttggtttgctgcacccatcaactcgacattttcattaggtatttctcctaatgctatccctcccccagcccccagccctccgacaggccccagtgtgtgatgttccctgccatcagggcctactttttatagggtggtcaagaaaggtgtccctgaggatgcacagtttaagttaagtcctatggaaaagaatgaggcagctatgggggagtgggagaaagggaggacagaaggcaaaggagtaggggaggagtgttttgggcaaagggagcagcaagcatgaagaccttgggtccaagaagacttgaacttaagctgaaagaaagccagtctggctgcagcatgtgagagggacagaggccccaggtggttgcaaagagaccgaggggcccactcctgttagaccttattggacttgattctaagctcagtgagtagccattgagaagtcttaaagcagggacgtaacatgatctaatttatgactttaaaatatcctgttggctaccatgttgagagaagatttgagcagataagcgtggaataggggaatcagttgctttttatctatagtctctagaggaaggccagtggatctgcctttgcaatggcccaaagctttgcacatttagaaaacctgcattattaatgaaacatttgcatcttaggaaatgataaaacaggctgctacatgtaaaaattaagtaactcaatttgttttaacagcttgtgctctagtacagcaatttgtttggcatatacacaagactccatcggaacagtaattatgccatgctaattattttactgcattgtgtacatctgacgtttaattatgggaaagtatgtgagggtagattttcttcctccctttgcctgcctgacaggtagttttgtttcccatacctcttttgcacctacattgtctttatgccaacttgtcatctgcagtgaaattgtgtttccatgacagctttgctcagccatgttgcctgcaagttgcagacaatcaccaaaataaacagttgacacagatgtcattctcaccctctcattctgcctctccctcccccttaatctagctcctactataaagattttatttttctcccacctcgagaaggaaagtgatccctgacaaccttgagcatcctttgatacgtcagcatgtcgctcagtgacttctcttgtaaccagtgcccttctccatggagactgttggcaagccaattcccatggctctatgcatagatgacacagctcaacggctatgggctgtagaccagcaggctctaggctttacattcatggggaggtggcaaaggtgggctctcaccactcaagattccaagaagttgaaccacagctgtggcatgtccttcacagagtgcattgacaaacactgtaaagtgaagcaggcttgtgcctgggccgtgcccacagagataatgggcttgagggatgcaggtggggaaagggaatggagaaagaggaagttcctgcctacaggtagaaatataatatctcgacttggataaaagaaggaaaagaaggataaggtgcagatcataaactacaggcacctcttgctagccatcatcacagctaatgcacctgtaaccgcctccccacacacaggaaacagttgtctatgtctctctactgaagaggtagttgcaaagagaaaagacattgtgagagtagaataggaacaaaagcaatggcttgaaaataaaaataataccaaaagtcatcttttcaaaaaaataaatgcctggcaacaagactgtacacctcaaaatatagcaaatgcccattaaaatatttgcacaaccctgttatgagtataaaataaatgtccagagggattacagatcacgggaatcttcccagagctagacaggagtcattctttcttcttggtgtgcaccgtatttccttgtatacttggggttagccaagaaatttagtgcatctcaggaaaatagaatagacatacagaccttcagcttgatacggaacatgctttttgagaagtcctggttcctgcttagttcatgcaaacttagatttggatcattccagcttatgttttgctatttcagatctactgaaactgcaaaccctctggcccaggaatttgcataagtcagcctttcccttgagtgccaggcaaatctctgttggttcacaagatgatttttggtggcacgtggaccatgtttaaaaaaattttaatagttgtatgttcattttaatatgtatcaaaatatgtctaactggcacctcaaccctgtgttttaatggatataacacagtttcttgtgtaaatacagacttggcatgccttctttttcctctctttcaggcccttattccctttacaaacttgctgagaacttactactttgaggttcctgtcttctggaatttcacttggctctcttcagccctctgtcatacctctctatttcttcctccgccttttcccccttcctttttctttaccccgttatcgtccacaggcattccttagagcatagtgtgtgctggacatgtggggtacttcaaacaggaatgtgtacaactatagtggcttaaagaaacaggactctgagtcctgaggaaggcagaatagagctgatgtggctcttctaggatggtgtggaagacccaggctccttctgtctgcctgggctaccatctttaccatgtggcttcatctttaggtttgcaagacagctgctacacaaaagtgatacttgtgaagtgccctctctctagactttgtttgatatttaagaagctaaaccctttccttcagatctccaaggccagtattgcttcacatgttctgcaagggaagtacagggagttcatgcttttgctttacagcctcaattgtagaggaaggcaaggaagaatcgggttatgaatggtttaggcatagctaagccacagagtcagccaaggaggaggatagtaagaagtacagataatgatctctggccttccttttccaagctgaaaaagtaggtgttaaaagttaacagctttctaagttggtgcatgatcgtaaacctgcagaatcaggaaagaatttagaagtcgtttggatgagatttatattttaaaagataaagaaactaattcagagataaaagggacttagggctcagtgggacaagagcccttctcagaagaccctgctaatttagtggttctcatctggaagtaagcatcagaataaccggcagtacttgttagaatacctattgctgggtcccactcccagagttcagaattcagtaggtggtctggctggggcctgagaacctgcatttctagcaagttcccagatgatattgatgctgctccaggtactgcgctcggagaaccactgtgctaacctattccaagcatgtaatttacaatcagtaatccccaaacagattttcgtatgttttactattttaacttgtgcattgttgtgtgttcgttaacagctaagtaatgtagttgcagataattaatgcagccaatgggtgagctaacttaatcttagacctgtctatagctatgttatttgaaacccagagggtctttgctcctatgacctggctgtgcctcaaagggcactctgcccttttccggagatgaccactactgtgtatttagtgaacctctgtggtccatgtttcttgattttttttcaccacttaaatacgtatctatatgtggcacatattgcaacattttgtatattttcaaacattatacataaatagtatactctatcattctgtagcatgcatttttcattcaacattatgttgagctcctcatgctgacacatgatcagtctagtttaactaactgctttgtagtattccatattcatatactagaatgtatttttccttccctcatgtttcagattatttttaagcagattaatgaggcttcgatattattattaacagcaacaatatattgaagtggatgacatattgaactatttccatatatttgctcatgtaacaaatatttatcaggtgcctactttgggctaggcactgttttaggcagggaggatacagcagtaaatgaacaacctcacgaccctgatgatgcttattcatatgacacctgcaacagctctgtcaaccaggtgttattattttcatttttacatatgaggaaatggacattctgtgaatttaagtgacttacctgggtcccaccaaagagaacaagggagttttgaatcagatcatctcactgttatctcagctctttctacagttccaccaggatgtctgctgagcctaataacaaacaccattccttatcttcctaattttctttggaggtcatgacttttgtttaaatatgctttttattttggaataattttagatttacagaaaagttttagagatagtacagagagtactcctaaacctctagtctggtttccttcattaatagcatcttacattactatggtacatttgtcaaaactaagaaactggctgggcacggtggctcatgcctgtaatcccaacacctggggaggccgagatgggtggatcatgaggtcaggagttcaagaccagcctcgccaaaatggtgaaatcctgtctccactaaaaatacaaaaattagcccggcgcagttgtgggcacctgtaatcccagctgctcaggtggctgaggcaggagaatcgctcgaacccaggaggtggaggttgcagtgagccgagattgtgccattgcactccagcctgtgtgacagagcaagacttcatctcaggaaaaacaaacaaacaaacaaacaaacaaacaaacaaaaaaaaccaccaaagaaactggcatttgtatattactattaacagaactccaaactatattttggtgtcactggttttcccattaatatcctcttctcttttccaggatttactccgcagtgccatgttgcattcagttgttatgtctcctcagtctctttactgtgacagttttttcagtttttttcctggttttcatgaccttgaccttatttttagtttatcccaaatgtccaaatgaggcagtgtcaagaatttagagaacttttttttggggggactgagtctcgctctattgcccaggctggagtgcaatggcgcaatctcgtctcactgcaatctctgcctcccgggttcaagagattctcctgcctcagcctcctgagtggctggtattacaggcgcccaccaccacatccggcttatttttgtatttttagtagagacagggtttcaccatgttggccaggctggtcttgaactcctgacctcaaatgatcctccccacttggcctcccaaagtgctgggattacaggcatgagccaccacacccagcctagagaactatcaatataagtatctcttaagagagtttggatttgattgccatttcagcacattagagaggggcatcttactcacacgtgctctcctggtgcaaaaacacagggaaacaatggagtgacgcatggcctttcgggccaggtgcttgcagagtatggcaaattgtaggtttcgatgaacaagcagcttaccaaggaattataacccccgctcccctgccgtgtccaagtccaattccaagtgtcttataaccacagtttgatgctgctggctcctcccccagctccacctttgcctgtgagtatatgtatctttcaaaagtcatctcttatttccagtaactccaaatacaagccgccttttagtgacaagcagatgagcgtgagctgcagtcgcctggagtgtgcaatgctgtcaccagagagaacttagtaattacatttgccaggctcaccgtccatgttggctggcaacatgaagggatcagagaattctttgaaacaatatccaagttcttggttaaaagagatacaggctgggcgcggtggctcacacctgtaatcccaacactttgggaggccgagacaggtggatcacttgaggtctggagttcaaaccagcctggccaagatggtgaaacctcgtctctactaaaaatacaaaaacattagccaggcgtggtgttgggagcctgtaatcccaactactcgggaagctgaggcaggagaatagcttgaacccaggaggcgcaggttgtggtgagccaagattgtgccactgcactccagcctgggcaaaacagggtgtctccaccttaaaaaagataaataaataaagatatatagcattacactacaggatggaagagcccagaaaaaggattccttcttagaagctactgaagagcgaagtgatttcttagggcagtgtttcagacaaatttaaaaaatttatatatgcacacatataaattatatatatatatataaatatatatatgtatatatatataaatgtgtgtgtgtgtatatatataatccatgacccgtgtcccaaagaaaattattgacattttgcctattttcttctatttatgctttttaaagaacattatataacatgctttttaatatgctttcattcaacatcataagcattttacctgtttcttttaaataattattaaataaataacagtttttcatttaaataatctttagttcacctaatcattctatggtacatttggtaagtttttaatgccttgagaaataatttttaaaataggatgcttccctccttatttattagattatttctgtaagttagattcccaaagtgggattactgggtcaaatgttataaacatttttaaggcttttgagccattttggggttgaggaaaaacccttcttgttagagctctacagaagccaagtaatgatgctaaatttcctaatttgccgtatgtcactgtttgctctctgaacttaagtgaactttgacttggccacaaaactacagttctgatttaattcattcattcactcacacaggtttaggtgtcaggtacagtgccagatgctaaagataagagaccaagcgaaaccagagcccctgctctcatgtccagaatagcatctgacccagaaagaccctgatttgcttgacaatagagttagataaacccatttgaaagcatctatttttaccagagacttgatgcttgaatgctgactatcttcttccggttttgttcttctaagttgctccgattttagacaaagatgaccactccacattctatttgaaaaccattcaacttgagttcagggcacaaaactaaaatattttgtctgtgcctgggcaaaccattttgtgtggagcctcatgggcctagcagctgctgcttccttttagtaattgggaagcactgggatttctgataaataattgaaagtgtactctggcaagttgctacagcagttttaagggcagtgcctattttaccattctctgcattggagagtaaagcccttgattttatgactcgacttttctgattgtcctcattggtactcttagcctcatataaaacattttctttttcctttttttgtgatgatgactgagtgtgagaggtaccatcttgaaatggcttccttgtagggatggaagaagaaattgtctgatcaacaggagtaactatcagaccaactctctgatgatgaaaccatggtaagtcatctggggaatcttttggataaattacttgaggccttgaagtcagtgcagacttttcattgtaattatgtggatcgtgaagtcctgatgactcccagtggatctcagtaaagagtgactaatggatcatggggtcatttggttaagtgggagagaaaaatctgggcaaccaaggatcaggtttgaagtgatccccatctgtggcctaacctctggcaaatgctgtctcctcctgtcacctctgggctctgactcagcagggcctgcctctccagcctgattagaagaaagatccagacaatttggcagactcgggcatctccagcattgccccttgcaccctggtgcctccactggttaatgttgtcgtgtcaagggagcagagcctgtgtctgagcaaagcagatgatgtagtgcttgtgagaggcagtgctctgtgtcaaccatgatgtcatttgagagggccacccagtccaggtctaagttgtgcttttcatgatgtcaccactaaagtcccttgactatgaatcaaagacatttctcttatgctgacttcttttgttaattggtagtaagagaggaaagaggctctgaggattacaaaatatcttaccctttagcaacatcatggtgttgcctgcgtgaggtctcacatctctctctgtctctctttctcctttccctcttcctctctctctcctgctttccttctctctgtctcttctttatttaaatacatttgctttttaaatttttccagagcacttgtcacttcagaacataaataggatgtctaaaatacatgatttttaaaataaaaatttatcaaaggatcctgcaaaggaagatagtcctacaaggtcctttgatgtctaacgatgtgccattggagagctagaaggcagcaaagcccgactttctaagataaatgtagcatctcttgcaataattccatgggccgcttctgtctgtgggtctcagtgcaaacctgccaccatgagatgagctaaaaagcaagcttgcaaaatgaagttcctgaggagtgtgatctctagggccctagttgaggtactcttactacagccaggctgaaagcatatttcagcttgtagcaagctggtttcgtctctacctgaggaaagataaagaactttgctcaggaaatgtgagcccctgttcccaggcttcattcctctcaagctgatggacaggtatggaaggaatgcgttcgttggcaggaattagataatgcccaggcacaaatggcagtcacgttcttttcctccctctctctgctttgggggaaaaatgtggtaggaggggatgctctgcagggagaggggtgcagaacaagctgtctcagcttcagccagctgccgtttgtcactggattctgacaatggcatctggctccgtgagtgtggaagccagggacctccctcacggtgaaggccgagtgaccagtgggagtcagggtaaaccttcactgtgagtcaggaacaagctcccctggatatattttcccaaagaagggcatttctccacctttttgttaataggttatatcttcatcctaactacaagacttggtgattcctttgcttttgtttccagcgagaaggctttccatggcatgcaggtggctaagacaggaattaagaaacctaattgcggccgggtgcagtgattcatgcctataatcccaagcactttgggaggccaaggcaggtggatcaccacgtcagaagatcgagaccatcctggtcaacatggtgaaaccccatctctactaaaaatacaaaaattagctgggcatggtggcgtgtgccagtaatccaagctactcaggaggctgaggcaagagaatcacttgaaccaggcagtcggaggttgcagtgagccgagattgcgccactgcactgtagcctggcgacagagtgaaactccatctcaaaaaacaaaaaacaaaaaacaaaaacaaaacaaaacaaaaaaataaaaacagaaaaacaaaaaataaaaacagaaagaaagaaacctagttagcctgaagttccaaccataggattggccaaatgtgtaataggtcaagagaatgctacatttctgttacaaggggatgcttgaaatatatgttagctcatatgtgaagagggcaggatataataggctaaaaacaaaggccatgaagtagaaggtacagcacaataccacatcggtattctccatatgtattcattttaaaaagaagaatagaaagcatcacaaccaacatttaaatagggatgatctctcggtgatattattggtaattacttttcctttgaggtttctctgttttccaacttatttccttgaaacgataaacatttaacttctttctttagatggcttttaatcactctatttctcacaatcttgacctatatccatatctacatctatacttctctctagagttgctgtgtagagcactgcaccagcacctagtttagaaggggtgaagtggtatctggaatcaatcccttctttgatcagcttgttaagtcatccctgacatgggtcagtgtctgcccagaggaaagggagctcttttccaattttccccaaaggaatgtcttgttctagtccacacagtgatactggatttgctcacagcaaccctgcttgtctatgtgtgtgtgtatgtgtatttaaggggacttcaaaaagttcataggaagatggagttaaaagatacaaaataaagtttatttcccagtacaactccatcaaggtcaagatacttttgtaagcaatgatacctgccattcagtctattcctaaagaactgagggtcctgggaatttaaccatatcaatgccatcttttttacattaactgaagaaaaaagggggccctttacagattttaagactaggaagtaaaaagaagtcagaaggagccaaatcaggactgttaagtggatgcctaatgatttccgtctgaaacccttgaaaaattgcccttgcttgatgagaggaatgagcaggagcatggttgtggtggagaagggctctctggcgaagctttcctgggtgtatttcagctaaaactttggctaactttctcataacactgccatattaagcacactttatggttttttggccccctagaacatcagcaagcaaattgcctggaacatcccaaaacactgtcaccatgacttttgctgttgaccagtctgcctttgctctgactggaccccttccacctcttggtagccattgctttgattgtgccttgtcttcaggatcatactggtaaaaccatgtgcctcctcatttcaattcttagaagaaatccttcaggatctagatctcatttgtttaagatttccactgaaatctctgctcttgtctgcagcctgtttgggtacaacagttttggcacctatcaagtaaaggcctcgttcaactttatttttgcagtcagaattgtgtgagctgaaccagttgagatgtctgtggcattggctatggtttgcgcttttaattatcagtccttttcaattagagcacaaacaagttgaatttttttttttggaaaattgatctagctggtttattgtgggcttcatattcaacatcatctcattccttcttgaaatgagttacccatgtgtaaactactgactgggaggtgggctttgtccccatcaacttttcataaagcatcaatgatttcaccattcttctactcaagctttgttataaatttgatgtttgttcctgtttcaattttagcagagttcatgttgctctgatagagattctttacaaactgaagtcttacctttcttagtacctcaaactagatcctgttcagacatgtcataacaagctagtataagttgattttggtgcagttttttttttaatccatgcatggttttttcatagtaaacgttttccattaagtttttgaagatccctcatatgtatttttcccattaatcattttggtcatttcataatcaccatattgtattataaagagtaattatttctcagtctacatgtatcaggattctttttactcaggcctagattttagaactagctttctgtaggggtaggtaaagttcaaggattttgtagaagaatgagcttctttggacctttctactatcctattatgtgcctaaatccatatttcctagggatggggatgggctgggagagaagcaagaatatttgatgttgaaaggtcggtcatagacattgaccaatgggagacccaaataaccctgtggtgccaatagaatgcagggagcttcattgttctaggaggtggtgatggtgttaccggtaacctaaaataaagggacactgtgaccatgtggctatgctctggggtgaaagatggtgtcatcctcttttcaatctgtatccctttgttgtgtggggggaaactgatatagctttacagagagaactgcctgtaagccagaaacacctggtaaacaaaaagtgatggaaccaaatggctcccagggttcttgcctcaagtcagagaaaagctgtgatgagccaaaaaatactccaggtaccagagctcagggccttgatgcacatgtgaaaggcaggcaccttccagaaatagcatccctgaccccagagacttggatggccttgttttaatttcagggttagaataatgaccattttatgagcaaccaaatagttattcttggttctcctctcgagagtgtggtctgagaccttggcttgtatagtctaagtatgtaataactgagtgtgtttcccatgatcctgtgacagccttcactttgagttctatttcagaacatcctctttctggagacacctaaacataggccctagtgaaatggaatttagaagcagcattatctgcagggcagtctggggccaagctggccaactcctcaccctcagttcaatggaaagcaaccggaagttgcccctacatttgggggatggtaaaaggagctaccatttggtaaaccgagtgagtgtcccagggcagcttatgaacaactggaattctctgagaaatcagtcaaattggagtgttgggcggtgacttggagttgagaaaggagcactaaactggaattcacagcagctcctgcataaccacatgtgcgtcattatcctggatactgtcatctctgggtcatggccagggcccttcctgctcttaaaccctatgcatggttttatgcacaagaaccactagctcaggatgccttacagaaaacttttttgcaagaggaaaagccttcaaaccaggaagaagtgttgattgtcctctctctgtcataaatgcctccattttttatgataatggcattttttaaatgttaatgatgagattgttttcacctcatagaatggcttccaaaactaaatacagagcaaccaggaatatcggaatgaatgatcccttgaacactggttaactatggaagtgaaacccttctgagttttgacaggacgcagcagcctcagtgtcagtaaatacttaggacaggcaggatattgggttcaggggaaccttttggaagagtcaggtgatggctggttgcaggggcgggttctttttggaaccccagtggccgatgggtctaaagccacacaaactatgccacatgagaatgtgactttaatctagccctctcttgaatgaaatcaagtagagattaagtcagttttgactctcatcagaaaggtttaaggtattggagttcctaaatttcatcctatgtctttggggttaagaggtgaggctctgggccacagctcctgatgtctcctggaggggtggttcatgagaatgaccatatcgaagagtccttgagaacatagactttggaattatgcagatctaggttataatcctggccctaccatgtactaggtgtgtaaatttggccatttaatacctctctaactttagcctctgtattgctaaatgggaaaaatatagtatgttccatgtagtgagtagttaggagaaaggaaagagatttcatgataaattaccaaggaatgggggctgggcttataagaaagggtctggcatcaatcctgtgaacaaaacactaggattagacccatcacctctaaagcaggaagaaggaagttagctgggatatgggtggtgggccagtgattgcagaggcccatcaagtaaaccaagactataatagggaaaatagaagacctactgggggctgagcacaggtaggatgcagctctcaaggtgggcacagaacaggcacgtgtgcaaggtgcaagtccttagatcacttggtgtattcgtttcctactgctgtcttaacaaattaccacagatttagtggcataaagcgacacaaactgagtctcttacagttccataggtctgaagtccaaaatggatttcactgggctgaaatcaagatgttggcagggtcacattcactcttaaaatcctaggagagaattcatttctttgcctttttcctgattctagagtccacctacattccttggctcaaggctccttcctctgtcttcaaagcagcagtgaagcatcttcaagcctctctctctgctgtgtcatcacatcccctctttctcctcccaggcccagtgtggaactctgttggatggcactagacagaaatcacatccctcctacaggatttctacaaagcacgtgttcctggagcaactattatgaggaagatagagaaggcctagaaaatttggtccctgttgcctttgagacttgcaccatcaccctgcaactgagcactctgaccaaatatcaagatcaactgtgctttctgaaagatcaaattaagtctaattttaaatgggacaaaaggtagcactctttttatattcctacttaagaagatatccttcttggttctgttccattttgcacatggagtagttttaaagagccacatccaaggctggatttgaaagctgatgaacgtagctatgaagagctttatgatgaaaagggttattactggcctcccatctactggcttatctttttttattctttaagtcatgtgacaaatgagggttctgataggattgtctttggtgtggtttcatgagttgacataattaagagccatttccatttggcaatgctgcaagaaaaacatttccagtcagaagaacaaggaaataacttaattagcaactcaggtgagcgctggctctttagaaagatgttaagattggagggaagacaggagacccacagaggcagcgtgccacagttgggtgtttagccaaagacacgttcttctgtctctttcctcctgcatgagtcttttctgactgttcacctgaaattggatatggaagggctctgctgctgctgctgccagcctggtagacagaaaacgtcagtgtcaaagaaaaatgattgtgtgtttggttccctccagttttcacgaaataaacatcacttggcaattccttggagatgaattagccactatttcattcctgttagtccttcctgctgggttaattattgctgtgaacaatggcagcattaatcagcatgataacagtttctagtcattaacagtgtaaccagcttttatgcatatggaagtccctctatcaaaccatcatgaagatcagaaactcattctagggggtgctccttcctaggagacccacaagtgtccaggctgggaattgttcctttgggtgatttaattttgaataggttccaggtgtcatctgcgtaacaaggctgaagaagtctgttttggtggaactccaagacttttgctctgggtcagagtctttgacttccatatgtatcagctttgatgcttttaaaagctgcagaagcagtccaagtatcatggtttagtagacagattttggatccagacaggcatggattcaaacatgagcttctggactaagcggtcgtgggactttgggaaaaatttaacacttagggataaatataatctatgtagaacactttcacatagtgtctggcacacaataagtggtcataaatggtagtttataaaatgagaataccactaaaactgtaaaaaaaaaattaaaaattatgtgactgcagcctgttttctggggctttaccagcaaggggtatatcctcagggaaagaataccatcagtgccactccaggtgaaaaggtggctagagtgttccctactcttaaagcaagtcactatcagagtggcaggtttttacatgaacaggttcctgaaaatgccaaatggcagtaccactccttgtaacaactgctggtttcatctagtgatggccaaggtcctaaatcctccagacctatgtatcctacaaattcctgggtcatttcttctttacagaaccagaacagactgccttgcccgctttctcctgggttaacaatgggtcttgactcggtcctgcctaggacctcaagagcagcagaacaaaaccagtaactcaaaattttctttcgctttcttggtctcacctggcctttcaaaagtccaagaaccctcaaagactaaaaggagcatttgggccagaggcaccttcagccagtgtcactagggagaccagttcaagaagatgaccaaccaatgcatggtcttagctccacccccagcacacacatgtcctccatatatgactccacagaatgcaacatacaacatatctaataaaaatcctaatacaaattattgaggaaatacagattcttttatatgtaggcattgcaaatgtgcacatttcaaaaaatcatttaaacaaatttctttagagacaaggtcttactctgtcgcctaggctagagtgaattaatgtgatcatagctcagtgcagccttgaactcctgggctcaagtgatcctcccgccttggcctcccaaagcactgggattaataggtgtgaaccaccacccccagccacatttcaaaaatattcaagtgggaaggcaaaaggcacacatcatagaatgtgacaaccataacattgtcctagtgtgtgatgctgggcctgtatgagagcgtcttttcttagttatgctagttcgtgcttaggaagcgctgtggcctgttcttgggtgtcacgtaaagggccaaggagagaacctagagttttcaaatttcttcaatctacttctgacttcattggcaatatttggcactcaccttgtataggagaaacagagttctccttttgagaatagagacccctttgggtcgcagggaatagagtttgttagatatctccaaagaacgggaaccctggtacagcttgggtgagactttttaaacaaacagaattctggctaacaccttctcttagtccctagaaatcctccattcctcttccccacatcaaactttgaggtagagctgggattggcagcagcttggctctgccatcgtgtccaaattccactatttctgtcctgaatttgcatttcctggcagacttgagccaagtcccaatgaaacagccatagcttttcaaaattacaggcaaaatcaggctgggaagaggtgaggggggcagggaggggacgggggagaacatgcacagtaattgtcacgaagggcccagtgatgtggatctggactgaggaagtcatttcacatgatctttgctcactcacttccagtttggctcttccagctcctcaatccgggcatggagccgtgctttttatagattgtaagtccattgtggagttatgtatcctggcagtttgtaaagtggtgttttctctatttttatgggtgccctaggacagtgcaggcacacacacctttcttggtaccttctcattccacgctacttgtgattaatgaagaaggactgccacctccagtcgcttcacaggatagacttggggcagcctctgacttgctgtgtgtccctggtggagccaaccctttcaagccccctgctccctgccccctgctggatattgtgggagtgaatgagggatgaggatgacagtaaaccctccctgaagggttatgtaaatctgaaaggctctgtggactttgaggctggcctagggaaacctcaacaaatcagctactccttgcttccttgctttttattagattccctataaacaagtaggacatgattgtgggggaatcagaggacatggggctccttcatgcttgaggacttttccccagcactggtgccaagtagttagggcctcttctcctgatgcagccctgattagcctgtttctccctcagacctcaaccttttgttgaggggaagaaacacttgtggtagaaggaaacataattaatggaaggatcatgtgcatggactatcatcttatcagtgatgataataggcctggttgcctagatctttccagtcagccgccatgttctgtcagcatagctttcataatgtcctcttcctgtcattaacaatgtctttgggtttctgggttttctgtcctcaaattcatcctgaacaccataactaggtcgttcatcctggagagatatcttggtactttgcctcccaatgtttaaaggctccctattgccaatgatgaagtcctaacattgtatcctgacatctgcatccctacacagtatgatctccgctcatgtttatgatcttctgtcccactcttcttccgtgggaaccagaccattgagctcttgggccttcagacacctgtctgctcacctctctgctcagagttctttgcccggactgccctgcagtaatgatttttttgccctgcaataattattgcaataataaatacaataataaatgcaaaaataataaaaataatccaaacaataattattgccctgcaataattatctctccatatcctcatctctcacagagaagccctgacagcctcagccccagggagtctctctctttctctttctctgagctccatcagcattggctagctgggaacttgtcactggtttatgttattatctaattggtttaggtgctttatagagtatctaccctaagggcaaggactgttgtccacctctttgcagggcgcactgtgcctgatatgctgggtggcccttgtccaaagtgggggtggccttccatggctgtcaggagcaccggctcaagtgtgaggatcggatcccaccacaggatccaaccacaggcgagctccttcatctctctagtccagagtttcctcatttgcaatgtgaggagtgatgactctcattttatacaaatacttgtaaggattaaattagatattctggtttctacacttggcatagtgctcagtgtatgattatcattatcatcatcattaaatcaatgtgtgttgacgaccaggaattctggtaacaggatcctgggcctttctgaggggctggacattgccttggtctgcctgtggaatccctccctggcctggcttccatacatgtgcctgtgtctcagtttcctcgtgtgcatattgggacaacaggaatacctactgcccagggttatcataagaattaaatatgacaatggctggaaaatgcctacatttaggaaagaaaggcttggtaaatgagaaaaccatggaactctgctaattgctgtgagtaaatggtcaggaattatggcctgtgtcacagcttgagctttccttgatggacctgtttcccaatccctgtgttgagtctaggtgggatggggaagaaaagcttccaagcttccttctggctctgactttataaattctgctcatatgcctccctttacccacttagtctagaccagagatgagaaagttttgggattttggagaacgatttgtattccttgcttagaaggatgagacccttcaagtggctgagttggatgggatcacctgtttgcccccaggcagctcatgagacccctgcaaacttctccagggacacagagcacccctggaaatatgtacattctctaaaccataggatccaatgcaggcagattagcacacctccttccgccctccccctccatttcatcagctttatgctgaggtggataatgtttctctaactgcctaattgggagaatttagctggaaaattgccatcgtgttcttttaaagggtgccaacagcccacggctgccagctataatgtcagtgggtaatcccggctctgccgccacggagccagggaggacccgtctttctccagactccttcccaggtggtgagagcaggcctccagccctaagaggaaagaacaccaaggaggaggacagaggtggccaagaaagcagctgcaggcacaggtctgtttccctccctcctcatggccctcccagcctgcaccactgggaattgaaatgtactgaaattgcaatgtcacaccaggacaccctggccctatggtgtactgctcagcttcatggactcccactgcagcaatcttgagtttagactgagtctgggggttgttcaagaaaagggaaatctaattgctaaggcttgttcctaagtctgcgagagacagtgtagaatagtgttgaggcgtacagacctttgagccaggctgcttgcttatgttctaatccaggctctgctactcgctgggcaagttaccacatcttctagcttcatcatctgtaaaacagaggtgataatacgagcactttcctctgttcacatatcaggaggcccaggcagatggaggctctgctatctttaacacgtggcatccgggaccttcttgccaggtaggcatctagcccacagaaaaagagaaggcataaaggattaggtagggaggtttttgtcctactctggtcacactccactctctagactgcagtcacatggtcccagcccagctaggtgggggagggtagttgagctgctgctagggatgaagagtctctgccacactcagaaaacctccctaatcgtaacagtagctgacgcttattgagtgctttctgtgtgccatgcactcacacattcacttgattgattcagttattaaaaatggcatgatgagccatgcacagtggcttatgcttgtaatcccagcactttgggaggctgagacgggcagatgacgaggccaacagattgagaccatcctggccaacatggtgaaaccccgcctctactaaaaatacaaaaattagctgggcatgatggcacatgtcagtaatcccagctacttgggaagctgaggcaggagaatcggttgaaccagggagtcagatgttgcagtgagccgtgatcgagccactgcactccaacctggagacagagcaagactccatctcaaaaaaaaaaaaaaaagaaaaagaaaaaaaaggcatgatgatatgagatatacattatatatcagtgagggtcatggtaggaacccagatggaaccctcaaaaggacagttaaagaggatcgaatggtatttgtacacccatattcatcatttgtacagccatcattaattacgtagccaaaaggtagaagcaactcaagtgtccatcagtggatggatggataaaccgaatgtaatatagacaatgagatattattcagtcatagaaaggaagaattcggacacaggcaacaacatggatagaccttgaagacattatgctgagtgaaataagctagtcacaaaaatacaaatactatatgattccgtttatgtgaggtacctagagtagaaaattcataggagcagaaagtggaataatggttgctagaggggaaggtagggaagggcaaatgaggagctgctattgaatgggtccagagtctcagtttttcaggatgagaagggttctagggacggctgatagtgatggctgcacaacaaggcgaatgtacttaacgccacagagctgtacacttgaacgccattaagatgttaaatttgatgctatgtacacttcaccacaatgaaaaataattttaaaagagggtttcaggaaggaaatttttacaaatagatgggtgataggtgctgatgagtgatggttaaacatgaggaagtagcaactgtaggaagctgcatctacccctaggcctgaggggtgcatggaaggagagttactgggacaagtcgagagcagtagccatgggagaagggccgcccaacagaagctgtggcttttgggaactaagcacttccaaaccacagcccagcagagaggatccaggagatagatacctgacttctgtcctcttgccctctgatctcctgctcatgactcccattgggtgcccctctctggaagtcagcagccaagggaagctggtgatgtagtccatgagaatcagcctccccagggctcagagaagggtagagggtgaagagcagactttgaggtccgctagaaagtatgccttgcagctaccaccatggggcaaaaatgaggtaaagtcactcgcccaagctcacactattagtgacctgggttggctttgaacctggaatgctgaccccagagcctccagatggaagaaggagaaactaaaatgttatgagggtctaccttgtgcctggcactgtgctttctcctctctgatgagtgagaaaagaatcagagaacttaattaaggaacgtacccaagatcaagcagccaagaggtggcagatccaggattttactccaaagctgctgtctctccaccaactgcatgaccttcaggctgagagcccctcactgtcagcgctgttatcaccagcatcaggagcaggcactgagcaagggccgctttgtgctgtgtcagaacaaagggagctactgtgcatagccccggtgcctctcctgcccccattgagccttcaggctggggcatctactttgtaacaagccacactaaacatggacacaaaaatactgttcgttccccatcagcagtcaccagaatactagtcctgaaagggacatttgaaaccatctttcaaactccctcatttgctctggacccaaaggacccattcatccagtgtgagtttagatccagagttccacatggactgagcccctggctgaagtctactctaaactagacatagggaagacccaagatgcagaggacacccccagatatctagtacagtatcctctccttttcatttgcatcaccgtcccctagacccagagtccgaaactgcagtacacactggtcacatcaaccttctgcctgttctagtgaataaagtcttttatttatttattatttattttttgacagagtttttgctcttgttgtccaggctgaaatgcaatggtgcagtcttggcccactgccacctccacttcctgggttcaagcaattctcctgcctcagcctcccgagtagctgggattacaggcgtttgccaccatgccctgctaatttttgtattttttgtacagatggggtttcatcatgttggccaggcttgtcttgaactcctgacctcaggtgatctgcctgcctcagcttcccaaagtgctgggattacaggtgtgagccaccacgcctagccatgagtaaagtcttaatggtgcacagacacactcatgcttacctatcttctatggctactttcatgttataactgcatggttgagtatggccccaaagccaaaaatacttatcatctgacacagcttatcatttacagaaaaagcttgctgacctgacctaagccaactgtatgagttccctaaagctgctgtaacaaagtaggtgcaatttatagtctcacagttctggaggctggaggtccatatggccaatcacagtgcctgtgacctagtgagccagggcagggaaggctccctgagaaaggatgctcaggatagagtgtgaaaggtagagaggacatgaacaggtagagacgaggtgaaaaatggcctaggcatggggcagtttacagcaaggccctgcgaggaaggatgcacgggcagtttgaaaaactgaaagtcagtaaggccgttgcagagagggcaaaggcttgtggggtagtagtaggtggtcagggcagtcagaacagactgtgcggcaccacagcccatgttacagagctcggtcttcacccactggatgtgcactggaaggtttccattaagagggtgacacaatcccatctgaactatgaaataattattctgggaagtggacagttggctgtagaataagggtttgagggtggggtgagctacgctgcaaaaatgggagacccgttaggaagctattacaatagtccaggtgagaaataacgtagcccggtgttatgcattgaattgtgtcccctaaaaagacactgaagtcctaacctccaatatctgtgaatgttacctcatttggaaatagggtctttacagatgatcaagtttagatgaggtctttcggatgggccctaatccaatatgactgtgtcagagaaggggaaatttgggcacagagacagacatgcataaatgaaaaatgatgtagggtacagagagaatgccttctacaagacaacgaacacctaaagttaccagcgctaggagagaggcctgcaacagaccctccctcacagccctcagaaggagccaaccctgccaacaccttgattttggacctccagcctccagaactgtgagactataaattgcacctactttgttacagcagctttagggaactcatacagttggcttaggtcaggtcagcaagctttttctgtaaatgataagctgtgtcagatgataagtatttttggctttggggccatactcaaccatgcagttataacatgaaagtagccacagaagataggtaagcatgagtgtgtctgtgcaccattaagactttactcatggctaggcgtggtggctcacacctgtaatcccagcactttgggaggctgaggcaggcagatcacctgaggtcaggagttcaagacaagcctggccaacatgatctatctacaagtgtaatgctccaggggtgtagtgattctgggattactatgtctccttgttattagacgctccatgaggatgaaaagaggatcttgatattcctgctgttgtttgacttcatatctcagcaactggcacacggtaagccctccaaaaccatgtgacaaaggtaggagaagggaggaaagaaaacagaaggcagccagggccccttgaagagctcagagcctcatgagtgaagtcaatatggaaacagaaagggacaacatagcatcaaaagtattatagagaaaacatagggagctttgcaggaacacacaccagagactcctaagatgagagcagagtgaaatagggagatggtagtgcctaaacttagtctcatgagagtcccttagttttgttcttccagagagagggaaaagtgtgattaaaagcctagaggctgtattcattttcaattgccctataataagttgctaccagcttagaagcttaaaacaacacacatttactatctcacatttctatgtgtcaggagtctgggcacagtgtagttggatcttctgctcagggtctctcaggactgtaaacgaggtgttggttggactgcattttcatctggaggcttgactggggaagaatcttcttccaagctcattcagttgttggcagaattcatttctttctggctgtatgactaagggtcccactttttgctggctgttggtgagaaaccatcctcatgtcctagcagtagcctgctgttccttgccaagtgagcttcatgccttacttcatcacattaacaaagagaatctctccagtcctctgagacagagtctcatgcaacctaatctaatcacaggagtgacattctatccctgttgccatataacataatgtaatcctgggagtgacctcctactgcctttgctatataacttagcctcatcaaaagagtgacatcccatccccttttccatatgctgtcagtgagaagcaagtcttaggtcttacccacactcaagtggggggcatcacaaaaagacatggacacaagttggcagaaaatcatcaagagaccccccaagggcctgtccaccacagacagaggcctgaaagagcatgtggatgaggatactgacagtcttttcttcactcagccaggattcgtagagtacccactctgtgctaggcaatgttttagtgctgagaacacagtggagaacaaggcagacagagcatccaccctcttggagcttctccattgcagagtagtgagagtgtgcaatgagggggaggtggctcttacgaaggtggcctttggacatcttccttctgaagtatggcatgtggagggacttccttctcaaagctaccccatccaccaagagcattaaaaggagtccttcaccaagccatggcttcaaccattcctcaagacctcaagggttacagatacctccagtcatctctagctgccaaagctgccatggttcacccttacaacaattgagccaatctctcctttgtgcccttcatctgcctctacctttcctccaacccagcttcttccctagcctggaggaacatctctctgaaagattcctctggactttggatccatggtagaatacatgcctgtgatccattgtgctggtggtctttggagtatgctgtgccagctctgtctatatctgccagaaatccattctcaaatgtggtgactccagcatccaaatgtcagggccaggacttgaacccaggttgcttgaccctgaagactcttctcttccactgtctcccactgtctgaaaataattggtccttgccttccatctggagaacttttgactttttgtttactctgcatgttcattgagtagctactgggtgctacttttgagtagctacattaaacctgtatcagatgccttggggcaaaaacaagcagggctcctacttttgatgaggaactatggtctggtctgctgggggaaagaggtatggattgaagcattacatgtctaaggggaagtaacagtcaaaatgagtgtgaagaatgagcagaacatcctgcttggtgataggagagcctgggaggcatctcagcccgatcatcgaggtcaagaaggcttctctgaaggagttctcaagctgcaattaaaaggaagaagaaagttagccaagcctagggcatgaggggaggcagttagaacagtagtctaggcagaggacacagcacaggccaaggcctttatgtgggagagacattggaagaactgaaagaaggcaaattgggctggagcaagagagccaggtggctgttcttactgaagctgaagtcgggcagccagacccaaacaaggagaattgaaaggctccaagccttctgcacattcccaggctccctgtgatcccagcatggccggggcctcccatttgtcattctaaaaagccccgccatgcctcctccctggggctgtcaccccttgggagaggttatcaccacgcagaaatctaaccaattggctcaccatgttcaaagcacaaagcttagaataataatttttttcaagccttcaggaatgtcaaacccacatctacttgcaatgaaagaccagtgatatacagctcttagctccagggagctatgcagaccacagctcttacgaaattaaataaagctgagaaatgcatcagggtctataaaatcaagagggacgcttgattttccaccctgtccacctccccaacaccttcacacttgggaatacaagcttgagctaggagaagtgtgagccacagggatctatgaaaaagagagagggagacagacagcctcactcatcttttctgctagcagccaggagcagggtccagccatatgggcagccatgaggaggcaaggactgtggagcctgctcagtgttaattagaagcaaaggaaggcctggctgaagtggctgcaaggacgcccagcagcgaccatttcctgcacagggcaggcggccttggattaggggctgccaggtgctgcctcctctgacacgtttggcagcatctcacctgctcctgcagcttgtccctagatgcaggtgaccttggaatgctaagcaaagctgcatttggctaaagattctacagggtactactgtctccccagctctctctcttttgcaggtttgtctgcaaaaactgaaggacttttgcttttttgaagttcaacataaggatgggtgatatttggcccactgctttgacacagggtcattttgatgtgacctagaaatgaagttagtaaattatcagtatctgttgtgatgcctagcaagatgggatgcctttgcatgctacagggagacagggaggggatgcagtatgtacagtagcatcagggatggggaagctcagaactgagacaaagattgaggaggatgtcggagatggtgaagcatcagggatgatgagggttagactcaatactggtgatttttttaaagagtgttttgcatgttgatacaattttggcactggaatgattatagcaagatggccacatcaaaatgactcactttgcattggagatactaaggaagggttcacttgacagaaatgtccattgagttccctcatctctcctcccctttcatgcctttggtacagaccctcatcacaagccactcatactatttaacagtcccagcactagtcgctctgtggtctcccctccaaactgcagccagagggatttttctcaaacacacctgtttgaaagaggacccttggcttctgcattctgatctctgaatcctgtttttgtttttcttcaactttgaagttcccgggttcaggtgcaggatgtgcaggtttgttacacaggtaaacatgtgccatggtggttttctgcacacatcaacccatcacctaggtattaagccaggcattcattagctattcttcctgatgctctcattccccctgcccccccaacaggctccagcatgtgttgtttccccccatgtgtctatgtgcagaaataccatttgacccagccatcccattactggttatatacccaaagaaatataaatcattctattataaagatacatgcacatgtatgttcactgcagcactattcacaatagcaaagacatggaatcaacctaagtgcccatcaatggtagactggatacagaaattgtggcacatatacaccgtggaatactatgcagccataaaaaatgaataagatgatgtcctttgcaggaacatggatggaacaggaagccatatcctcagcaaactaatgcaggaacagaaaaccaaacactgcatgttctcacttacaagtgagagctgaacaatgagaacagatgaatcttgatctttctacttgctcctgctctggaacatgttggtttatccagggatggcctcgggatattgtctggtgggtgtgtctaatctgcacaggcctgatgcccttgaagctgcctgctaccccaaagacaactccaaccttggtaacgcttggcgtgactttggacgagtgtgttctcaccacagtcatcatggcgtgtctgcatttctttgcctgaaaactgctttttccatgaggataaagatggggcgagaagtcgtaccttgggtatttcgttggtttaaaaggaaaaagaaaagcctcctcgatctgtgcaagcatgtacatatatgtgcattagaatcattaatagttctttggagagaggttaaatttatgtgcggtttaaccaaatgatgtgtctccaggggaaggagagggaagccgtcccccacccacattaaacagtatttgtgacgcatggaaaaaataaaagaaaccctgaacccacgagccatgagaaaacaaaggggaaatcgaaattgtggatctgccagaaacctgccgttcacagagcccacaaatcacaggcaaacaaagggaaatggaaagatttggtattaaaaacccattcttccctgaacctgtgccagcatctataaaacaattacatgtgatcgtacttgaggcttttctgagacactaattcttttcttgacatgaaaatggcgcgcatgtttctttcaaaatgccataccctggaaagaaggggaaacaattggaagggcagacccagaatgtggggcaggttagcccagctcctaaaaactgataaatctctgtggttttctttcttttctccccctgagagttttcttttgagctgctgattcttgaatggggtatgacaaccttgtctggttcccagatggttccttggttgccaggagaccagacatgggggtgagtggatccacgaagcgcccctctccaaaatacgagaaaaaatcaccaaagctcatgaccaggagaagatgataaggctggaggcttggcccaaggtggaatgaacgcctgtgctcagtttccaaggagaaagctgacctgccaatccatttgttgacccaaagttcatcaatgcattcaatggttctttgacttaagattaaataggacccctgtgtgaaattggctgttagtttttaaagccttttcattttgacaggtgaaaacctcatcagaattaccctatgcaaagatgtcaggaaaaatatacaagaggaaattggaaaatgtgattgagctgagcgtacgcttcctctgccctggagttctgcgtgggcttatttatttcttgcccctttgctcttcaggcattttccatcactgaggcctagatgtaaacatgcacaaaaggcaggtgattccacggatgctggctgcttcccggcgcggcttcatgggtgcacctcttggcaagggacccaccttcagatcaaatatgggggtatttccaaattgagctttgaggggtggagcccagagaaggagaggtaagaagaaaaataggagaattaagtgagaagcatgttgtgggccaattaatcagggctaatgcatcaggcccagtattgtttttggaactggattcgggagtaacaggatccctgacaagttgtagccagccctgggaacgagtgtctctggagttcacagacgggtctggaggaaactccagcacagagcagcaagtggcagggccactcggccctgcatcctgcccctgccacccatcaagggctcgttctttccctggccttgctgcccttcccactggtgagagacgaggtcgggagctgaagcttctgagcagggtggcgagccccagcctgagcaggcctgccctggcccgaggagtgagcacacatggggatgggtgggagggggatgccaggccatgttttcagaaagttcctgtgttgcaggctgcaagcagttccaccctggacctaggaacgtggcagacccacccacctcccggtaacagcatgcccaccctggggaaggggactttgagacagggaacttaatccctgcattttgcaaagagaaataaaatatacccagaaggagaaaagcctcagcccaagggataactgggggacctgacagccacttgctttcaaaactcaccaggcagagttgacttttcattgcaaccaggagcacagcatatcctcgtcttagtttttctcagactctgaggatcacctgggccagggcttttcaaaccctttctcagaggctgtaactccagaggctataacattgcctggaagaaggagcctgaacctccacttcaaataaaacaggcttgacttgtctattttacacaatgtgatgggtaaataaaaatcccactgcttggatccaaaagcagttttcactatttccgagctattttgtgttgaatatattatctagccattctttttgtgtgctctggtttccacctctgtaaaatgggaagaataattaagagtgcctatctcataggattcctgtggagtttaaatgggttaatgcatgtacaataccatgagtagggcgtggatgaagtaatcactcaaaaaatgtcaccatgactatttattagtattataacttttattatcatagtcaagttttagcgaagattcagtttgaggaaaaaatggggtttctgaaggttaaaacaagtttaaaatccaatgatttagaagagaggtgacttgtgatttgtatgtcagctcaactcagctacagggtgctcaggtatttcgtcagatatcattcgagtgcttctgtgaggatgtttcgggatgagattaacatttaaacctgtagactgagtaaaacatcttgctctccctaatgtaggagatttggatattccagccttgaaaatcatgtgagccaattcctaatgataaatctccccctttctctctttttctagctacacacacaaacacacacacacttgtcctctgtatccatgggttccatatccatggtttcaaccaactgcagatcaaaagtatttgggaaaaataatacgataataaaaataatacaaattttaaaatacatctaataaatatttacatagcctttacattgcattaggtattataagtaatctagagatgatttaatatatgtgagaggatgtgcagtggttatatgcaaatactataccattttatatgaagggcttcatggattttggtgtcctagggataggttctgaaaccaatcccccacaggtactgagggacaactgtatatatattcatgaatatggatatatataatccaaaaatgtctatgttctttgaaaaatcaggagatttggctgcagtggcctcaaattggctgggagtgatttcaactctccccttcaggcaggggatgtccccagttctcatccccaccccaacacacatgtttccttttagccagctccacacaggcaatggcataactttctggggactgctgggcaaattgcctgccctccagaatacaggattcattcacggagtgaatattcattggttaggtgtcagggtcaaggtgaataggacaggggtcacttcactcaaggaactcacattctgttggaaaagacaaataagtctagaactgtggcgctgaatggtcagtgctgggaaaggccaggatctctgaggttatccagtctggagtagaggggatgtttaaaaagcccactgaaaagtagagaatccttgagctgagtcttgaaggttgtacagaaagttagaccggtggagaaaaagataaaagacactctaagcagagcagaataacatgtgcaaaggccctgtggtgagggtagccagagcatattgcaaatagtacccaggcatattgtggcactcagataatgagaccagagaggggtagcgagtggcaggatcattaaggatcatttttcttgaaactgattcaagattattgagagattcttttagcaatgaaatgctcagtatatttccatttgtggaagttctttccagctttgttgtggagaatgaattgaggaggcaaggtgtaggcaaggagaccaaggagtcctggaggcagatggctgagcattcatggatctcatggagttgaagatctccattctagtagttaaagcttagattcctatcacactgttagtgggataagaatttaatctcttaacacacttcaatgtgaatgagactggggacctctcccaagagcaagtttccatggtgggaggtctagagggcactaaggcattgaaaacaaacttcagctttacccacgtcctgtcctgtgaagaggaaccattcaagggaccagtaatgaccttgggtgggatgtttgtgggctgttcttctggactaaatattgtgcagcaaaaaccaaagtgttattgcctccagatgcccacattcatggctttcttcttagaagatgacagtcaagtttcttttactccctaagaccatcaaagtggaaacactaacttcagcctcccatggcactcaggacaaaatgaaatatgctcagtattaagtcactattcctttgtcaaagcaactagaactcaaaaccagctaggcaggatgagcccaaggaggactccaatggtcaactttcacgctgactcccatgctgggctacttatttaaaaaacacagaaggacactttgagaggcagcaactagcattctcttgccagcagggtttgttgacacatgggattttcctgcatcagcttgtcatctgccagtgaccgcagagaaccctaatgagtcagcctcttaaaccctgaggtatccctggttcctttggtgaagatggagaggatggaggtgcctggaattggtcacaggatcactggaggatggaatgacccagtgtctgcttggccttcccaccaccacggacttagtatggaggctctggggcagatggttacagtaaggttacagatcatgcttttagtgcgtttgtgtccctcttgtcccaacccccaggatctgaaggaatgacttagcattattttcattggttgaagcaccaatctctcctgagcctaagtgacagcatggacccatattcctgacgcctttattctgggaaactctttacctgctttcatttacaaagcattttcttccactcttgcctttgtgctacgacaatcctgggaagtgggtatcattttccccatttgactaataggtaaacgaagcctcatctagtttgaaggacttgaccccagttcacaaatctttcatgtgactttgccaggactgatcccaactgttaagtccagggctttttgctgtcctctccttcccgtctgactcatgctgtttaccactgttttcttgggcccaaggggattccatgttcaccattcttcctaggctcttctagctttggactggatccctcattctgctggctctgctgcaggcttgaacctacctgtttgtatagaccacacactctactctgttttttcacttacccccagcattagcagtgccagagagaggcttggcagggtgatgagataagtgtacgtgaagcagaacaaggcgttccaagctaaaggccagtcatctctctgacatctgctccccaggaaagaagctgctttctggctcatggtcagtctgctttcgttcagataagcccagcaagtgggcctggacctgcctcttccagctggcagatgccctccttgccttcggggcacaccttagatgttatcttttccttgcaacattgcctgccttcttgacctaatgcagggttagatgcccgtctggtagcacttgtcacactgtgttaccatcctccccttacctgaccacctcgccagctacaccatgagcatacattgaggtcatgaccggcattctgtgtcaggatatggcatggttgggactaagatgagctgggaaggcagactgcctggatttcaaccccagcccctaatagctgtgtgactacttacaggctgaattgtcatatctgtaagatagggctaataatcatttctaatcaaaaggttatgagaataaaatggcataaagtctagaaaacagtcagcactgtgaagagcacacagtagttgctaaacatgtgttagtgattctttttgcatccccagtgtctagcacatggaagggaaggaacaggagctaggaggaaggaagtgttcattgaattaaggaatgatgaacaattgaatggatgatgaacaagtcacacaagcatgaggataagaacagcccccagagataccctgagaccatcctgccaggtttgtatgtcaaggccactgtcttgggggcttctgtgcctgcaaatcgcctatttcatgccaacacaaaccgtaacctgagaggcatattccttgctgagcagagaatttcctcaggttgttttatccctccagaaacaaggaaggggctaggtcagaagaagatgagatgacagaacactggggagaggggctggggtagggaagatgcttgctttaaatcctcaagggaatttctggaaggtcaagcagaggcggtagatgtagccaccaggcaactgggagtagcctatgagcttttgtgctgctggaagggtgcaggcatctgagatctgacctgggatctcagtgttttggcctttttctgccggcccaggtgtgtgaccctcctacccgctggaatgtggctgtgctggagatgtaatcagtagaattcctccggcttctcaaggaatgctcctttgggagagaaaagtacaaagaggttggaaaaatgtgaatcctgcttcttgcaactgaacaattgtcccattgtaatgactgtgtccggtaaaggagacgtatgatcaaatgacgtcttcatcagaaaccatctacacttaaccctcctgtcatttgacacatttgtaggtgggcacatcaatgtcatccacttcgtccacttttgctcttgtgtgtgtttgctgagctatttcatgtctactaaactgtacgggacatctgtctgtctggaattgtcagagctgtgaacactagcgtcatgcaatgtgtggaataggtggagatcccactgataaaatggagtcctctgtgcatcccagcatttgttcagattctagcttaaggctataaaaatcatctctccttaggctgtgggcttgggagccaaaaccttctgcatctactaatagcggattcacatctaggccaaaaatgtgcttatgattgtgcatagttatcggttgcatgtatactgtgtgtatacacacacgtgtgtgatttgggtgtggggtgtcctcgttaaaagggatgacgttctttttatagaaagacacttggtcatttggctccatagaaagggaagttcttcctggagtaattcgtgactgaataattaactctaaggcatgaaaccccatgtgtgagaagaagcctgctttccaaaaaaaatcaagccggggcccagggatacccattgggaaggcccaggcagcttgcctggggtcagagtttctctttgctctgggcatcctttctgacaggttttccccaaatggggaaaaagcacttgtcaagtatattttaaaaattttttaaaagaacattttgaatagcccctgcttcaggctccctgggggttccctacttatatttttaaaagctcaggccttggcaggtctcagcttttcagttggcatgaaacggactggaaaatgcacttgatcctccaacttgtgcctggggagcagggtttggacctaacaaagggcagatgagaagcagcatctgggaccttttgcagggtggtggggggctacagagcaagctccaaggcaccagtgccaacctgacagccctcctgctactgctgctgcgcctgactgcctcctccaacagccccctctggccagaaatgtctgtggctgctaagctgacatcatcgtgtaactactcttcgtagaataaacatctccctggtagtctgcctttgatagttttaacagttctccaaactgtcccaaaaaggtgaaagcatattggataaatacaattttgaaaatgcgtctacatgtcacagtgggattcttttttctctcctttctccctccttccctttcttccttcttcccttttctcttccaccttctacctttcttcctccttttttccttccttcctctcccatttcctctccccttttcctcctccccatttatctatccatcttcctttcattcttttgtgggtaaaacacaagcaaactgtaataccacatctcacacttaatggactaagtggggaagaaaagtgaggatttctaggcagagagaggagttttaagttacaacttcttggccctataggcagggaacagtgcacatttcaggtagagacagcaaatggtaatgtttcaacactaaataggttcccagcctcatgggtcctaacaaggaatcttaacccgaggttcatgggtggcactcaggagctctgttacctgaaattgcagacaaactatctatgcatattcctggggaaatggtccaccagaaccatctaaaaaccattgttgttacaacccccaggaacttaaatgttggactagctgtcttttgacctgtctgcactctacctcttctccctttaacagtaggacgacattgtaatatagtggttaaaaatgcaggcttggagtcacgctacctgggaaggaatctcagctccactcattaccagctgtgtgaccttaaatatttaatatcactgagtttcaattgactcagtgggagtatggattctactactacataggaatgttgaatggactaaatgagatcatgcccatagcgatgggctacatctcactggctcaatatatatcagtagccattggtggtgtggtgtcatgccctagatccatccctaatccataaaacatagatgtacttgttggaaggtatactctaagccaaaggacagcaaactgtgactttgggccaaattctgtccaatggctattttgtaaataaagttttattaaattacagccacactcacttatttacatatctatggctgcttttcaggcacaagggcagagtccagtagttgtgaaaagaaccttaagacttgcagagcctaaaacatttctatctggccctttgcagaaaaacatttgctaacccctgctctaaacaattagaaaacaataaatcatatataatctaccttggagacacacacaggtacacaaggagtcatagacaaggatgtttataacatcattattttactctcaaatagctggaaacaatctaaatgtcaatcacaagaagaatgctatacttacactgtggcagtgaagaagaatgcattctatctacattgagtaatgtggaaaaatttccagtagggattgttgagtgaaaaaggcaaagatgttaccatttgtgtaaaatgtgcaaaacatattgtatattttctcacagtgcatatgtaattatgcaaatgcatagaagggacgctggaaaaatatgcaatggacagataatacttgtcttgccttgagggaggaatggagcttagaggtttttgtcaatagagacttgagccctatctgcagtacttttacagaatgcattatgatcaggagaatgcattcatgtacttatgtaattaaaattgttttaaaaagtattgtttgtaaaatgtaagatacttgggcagaaggttgaagaatgggtgtaattctgctagacttctgtggtggggcaggaacgagatgtcaaggaaccacaagtgccaatcaatggtgggctggaaaggcagtgaggccgcttgacagtgaggacacagattggtatggcccattgaaggcaggagaaggtgatgcatgggagggaagtcatttttcacaatagagggccccctagggacttaaaatgttacacctaatgccacagcgagccactccagagagagatggcaggtgggaagtccatggatacttacacaaaagctggacagagccccagcctcggtctggcctgcctgagtcaggggaggaggctttactcttctcaataccctcataccttagttttaatttcttcagagtatgtcctagggaccagagaacttgttatgcttctcagggcttcctaaaactgactgggcaattggatttggattttttcattaggggtgaaaatgcctgcttctaaaatggctgccataacatgtaaaagtgccagtcagatgtggttttcggtgcaagatgactctgcattcatatttttaacattaggcaatcagttcagatggaagagaatttacatgtgcttcccgggatgatcagtagttatacaatgaataagaagaaactaaatggctagatcaggggattttgattgagacaagggtttgccttggtaggaatacttggcagaaacgggaaatagggcagggagataaagtttcaaaactaccgagattattttcaaacttcatgtctttgactagctgttaggaaagcagtcatttcgtgtcctcctcctggtccctgtggtttaaggtggtgaccgtgagtcatgagccatcctgggtcctccccaggcaggggtgggccggcaagctgtctctatgaagtgccagatagtaaatattacaggttttgcaggacatgtggtctctgtcacagccactcagctcttctgttgtgatgcaaatgcaactgtggacagtaaataaatgaatggaaatggttgtgttctaataaagctttatttacaaagcagtggcaggttagggccacagttagcaaacttctatcctaaagcaatgattcttcacaccttggtgtgtcagcactctattctgcccacaggggatctgtagtacatttggagggggcatagtgagtggataagggctgtaatttttttttgagactgagtcttgctctgttgcccctgctggagtgcagtgatgcaatctgggctcactgcaacctccatctcctgggctcaagctattctcctgcctcagcctcccaactagttaggactacaggtgtgcaccaccatgcctggctaattttttgtatttttagtagagacggggtttcactctgttggccaggctggtctcaaactcctgacctcaggtgatccacccgccttggcctcccaaagtgctgggattacaggcgtgagccaacacacctggcctgggctatagcttcgaaaaacaatttgggttggaattctggctcaaagtcattattagcaccgtgaccttggacaagtcgtttaacttcatgagcctctgtttcctcatctgtaaaacaggaatagtaatgacctcattgggatcttacaaatattaagttaaattaacaaaaagaatacagggtgcagatttactggactcaaatcctggctccaacatttattagctgtgtgatcttggaccaatttctttatatttctattttcagttccatcatctataaatgggattaacattcattcctacttcatagtgttgttaggaccatgatgtgagttcacagataggaaatgcttagaacggtaccaggaacatagtatactcttaacaaacattaggtaaggagaaaggtattacttctatttagatattacttctattcttagtactttttaagaaataatttttacttgaaataaaaattcataaggcctcttcaaggccatgcttataagatcacacttgatcatttgtattgcaattgtgatcaactgatcacacttgatcaattgtgtattattttagagagtgaggaatgaatggagcatcagcttataatccatagcctgacttatatctggcacaactaatgggggatgcaaataaattctaacaataatatattacttcttataaaaacaaagactaaaacccatgagctactctattgtaaaactctgcttcccataagttggggcaggaagggttgtaaggatctgcagagaaatctgagaacattttcaggaatgatcaactcgaccctcagcacaagccagacctgggccaatcagcttctgtctcccacccccacccccaagcccctgccccaggacctcattgggttcttttgaatattaagttaaattgatagaaagaatacagggtgtagatttactggactcaaatcctggctccagtttgcccagttataatcagttccagaattttgctggaccttttgggagaagagggttttctttaacctacaataatcactaaactggtagggtacaatcctggagaagccggaaaccaggtgatgactagaacccacctaagaatgaaaccagtaaagaagaagcaagagaggtgaattcttgataatacttacctcaccagatctggctgtacctgggtcctgttaaccctcataatttacagttataaataaattcctattgttcttaaaccagtttctgtcacttgcccttaaagaggcctaacaaatatatccaacttattgttttgtgacagaaataaaaaatattgaaaaccgttttccagaactccgccctggataaaacacagcaagctctctgcacttcctccatccacttagaaataagccgctacacactctgtatcaggtcagcataatagttctatgcccacgctagctgatgtagatggcaaattgatgtacaaaaaatgaatcaggaaggtgtcagaattgccggagatctgaagaattgggctcaggacagggatgagaagaaaggaagtgggtacaccaagaccacaaagggacaggatggagagaagggcactgccaccactggtgctggccctggatgtggacacctcactctggtacttctgccccagaaatggactgtgctgcctgccatctctgcaagaattatgcgtgctgacagacactgctttttcatcaaaagctccagattcaaaagtctcaggctagtgtgtctcattggctgagcctaggtcacacgcctgactacggaggcaacagggaaactgaggacctgaccattttggcttctggagtggagggtagactacaactcccactgagacttcggtagcaagaaataaaaatggaatgggatggaatacaatggaatggaatagaacagaacagaatagaattggtacatctccgctatggtccatatgtcctttcccagaaacactgccactcctcatggccatttactcaccatccttggtccctagcaatggccacagctcctctccttcactctgtgggtcaatatgaatctgatttgaccaaccctgcctacctctgagtcttttttttgaaacagagtttcactcttgtcacccagactggagtgcaatggcacgatctcggctcactgcaacctccacctctcgggtttaaacgattctcctgcctcagcctccgaagtaggtgggattatagctgcctgccaccacgcctggctaatttgtgtattttttagtagagatggggtgtcaccatgttggccaggctggtctcgaacttccaacctcaggtgatccgcctgcctcggcctcccaaagtgctgggattacaggcacgagccaccgcacccactctgagtcattttttctgggcctctcagtgatttctggtacatgttaccatcccaggctgtcaaccttgggcaatgtgatttccagaaggaccttggcccagcccatgccatctgtgagcagactaaatatgttcagagcactgggtgataactgattatcaggccggtccagcttcgccacgaggctttgcacacgtctgcttgcactgtggggaggagagccaggcaaggagcagccagaggaaaccacgagccccatcaagcctgccctccttgtcatttccctatggtctcccttgaaactaatctcattcctcttgacgactgcacagtgaggctgcttgcttcagtgattgtcaaggtagcttatcctttcgttaattaactactcagaaaaatgctgtacaacagtgtgctgtttagcttccagcttgttaacatgggggactccagaggaactttgacctggcccatggccatgagttgcatgagtcaagagaaaagcaggatggaagaggtgtctttttctccatggctcccccttattgtcaggaattacaggttgaatgggtgggaagaatgggaccaaccatgccgttggaaacactgcattttctgccacctaaagcaagaatgcatcccttacagggtcttgggaggtaagggctggcttatagggtaggaagatatgccgtgtagagtctgcctagatgactagaaatattagaatgtgttaacttcttcatttgggcaatatgaagaaataagagatcaaagttaagatgtgacttaaaacctaaagtcaagttaatatttatttgtcatccattatatacccgtcacaatgttgagaactagggcgctctctctccaagatctaattctgccctcaaggaggtcagcctggtaggacagataagacaatgcaataagctgcttcagcatgaaaggacaatgggcacgggacagaagccagggatgctgttttgggaatacgatggaggagcacaatacacagacttgtagcttaagataacagtcacgtattctttcgcagttctggaggccagacttctgaaatcaagatgtgaacagggctgtctttcctctggaggctctagcagagaatttgttccccgtctcctccagcttctagcagctgccagcattccttggcttgtggtggcatcacctccatccggcctctgtcttgtcttcacattgccttttcttctgtgtgtctgtctatgaagcccatccagaaaacccagcttcagtctctcttttcaagatccttaacacgtcttagtcacatcttttgtcatataaggtaatattcagagggttgagggattaagaagtgaacatttttgggaggccatcattcagcctacgaaggcccctattccagcctgaggtggggtgggaaaggcttcctggaggacaaggcctgccgatcctggccctgtttgcctcaaacccattcttcttccttcacctgctctgctctgtgactccgtggggttgttgatctctgcaggctgcagttcccaggcttgcatgtcagctggcttccatctgggccctgacaaggagagtcattcatgagagactggtggtggaggcactgggagggagaagcagagtatcattattattactattatttctcctccttctctgctctcttttcctccctcctccccttcaccctcttctttggtttgacagcctctctggaaatggctgtgtcaccttggtattttcatctcctgccagacaggcccctgggctctgtaacatcacccgttccctttatccctctagcgtacaggtgggaacagctccctgctgttgcttatctatgggatgtctcagcattctgggttgggctctcagttctcttgtcacctgcatacacaattcacctgcattaaattctttctgtaggaaatacctgaagtggttttgattctcttggtaggactctgaatgataccaagtccaagctgagattcaaggatgtagcctagggtaggaaggatcatcgtgccatgagttatagtggtcagccacacacacagcccctacctctggaaccctaggccaagtggaaaatacactaagcaacttatcactcaagttaatctatggttacaaacactggcaagtgtgtgaaggggaaatgcaatagttgtagagaagtacagtgatgggacttccagtccaggatggagggtccttagggctccctgaggaggagaagtttgctgagatctgacaggtacagagctctccagggtctgaaaggtcagtgtgactggtgaacccacagccagagtgaaggattcaccactaggggcacagagtgtaggcagagagtgcacgggatttgggtttgggaaaaggagtcaaatggtattgtttgcttggagcagaagggaatgtattctaggctaatagctacctaagacaggccttagcttgtccacaggagaacagggacagacagcacccctgctaaccctgccttggagtttgagcagccggttttcttttcaagaaatgaagtagcacgtggtgaagtagaagccatgcaagagaacctcaggctttagacactctcaggaagaggtttctagaagtttccagcacaaagagacctgtcactctccacctcccaaagaggtccttacacacagtggtggatgacaagcatgaaggatgaagcaggttctgcctctggttgggaaggggtcctacatttctttattagcacttgtgtgcagatagcggtacagggctgctgcatcagaatcctaggcacatcggtatgaaacacagattccctggccctaccactggagaatcagagtcagcacttcttttttttttttttttttttttttttttttttttttgagatggagtcttgctctgtctcccaggctggagttcagtggcatgatcttggctcactgcaacctctgcctcccaggtacgagcgattctcctgcctcagcctcccaggcaaatgggactacaggcatgcgccaccatgcctggctcatttttgtatttctagtagagacagggttttgccatgttggccaggctggtcttgaactcctggcctcaggtgatctgcccacctcagccttccagagtgctgggattacaggcatgagccaccgtgcccagccacagtcagctcttctcaagaagggcctggaatcggtattcctcaaagctccttggagatttggatacccagccaggtgcagcagccagtgctcaatctgattctcggaaagacccttgccccagctcatggttttggtgtaattatcagtctctccatactgcattcctctgaccagtcttgctcactcctggactagttgtaaatccctggctcagaaatgccgttgctatggaaagggttttatgctgtgattctctttgggtttgctattcttatgccaattgtttttgttgtcattgttattgtcgctgttgttgtggcaaaaaaaaaaaaaaaaatcgaagaaaaagaactttgacaggggagtaggaggcagtacggatctcagcattttgcaaactcctggatgatggaccctttgtaatacgtgctgtgtcttctgaaacaccgtgaaccacctggctaagatgagaccaacttaggagggaggacaggcttatttatgaacacaagccatacggccagccgacacactgcaggagatagagttgctcagtcccttccttcttgaaagcaactgtcctttgtttcctactttagagaatctggagagtaattggccaagaaaacagcggtagggaatggctaccatgcagagaattgtaagatgttggcagctaggggcacctctgccctcctgcctatttctcgaagtaaggaaagtcctggcctataggtggcccagagaaaaagggtggtaggaggataaagagaacggaggaaagtagggggatgccaagttagaactcaatatgttggtctacagagcaatttgttttcctttcactaacacttatttttgattatcaaaggcatacattcctccctgtgaaaattataaaaaatacagaaagtataaagaaaggaaaaaatcacttaggatgtcatcagtcactactggcattttggcctatttccttttaatttttgatatgcaatgttttttctttattggttgtaactgtactacaaaaacctttgctggttttctgggttttcatttaacaaaaaacatactgagatcattgtgccatattattaaaagctttttgagaatatttagatgatcatataatattccactgggtggctgcagcatgccttagctaactattcccctcatgttaggcacataggttgttcctaattgtacactgaaataaaagctccccaaatgtgcagaggccaggggtgcattcttagtcctgacctcacttttctcttgaagcaacaggagaaagcactgcctcacatccctacaaagtgagcccagctccagaaatcaacagcagacaatagagatttgcctacaaatgccctgggcctacctgggagatggcagcattaccaacctcacagcaaaatatagttgaaaatctccactagacacttctgtcctctacccctctcaccaccttctggactctgttttctcctcccctgccacagccaccccctgcaggatgcctccctagcagttagtgctttgcagaatatccgggggaagaagctaagttgttttgttgttttgttttgctttgctttgttgtgaaacacaaaatagcatgccgggagggtgcaagatgtcaagctgctaaatatttactcagttgctgtattgctgactcttattgctggctagtaagtagttgcaagatagactctagtttttggacggcactttgcatagcactaatcttcagccctttccttttatgctcagcagtttctcacttcttagcttctccaaacttgcattctcacaccatcatcctgcccaacaaagacttctcctttggatgtccccctgttagaaggcagtcaaggccaagttaattataccagtagtgctgaaatgaacatttgggcctaaacctttgtccacatttctgcttaggatagatttcccggagatgaattaagggtcaaaggtcaagggcattcttaagactcttgacccacgttaccaaactgctttcagaaagtttgcacaaattttcataatcaccagcaggagttaagaggtccagcttgactgaatccatgctaatactgacatcagtttgattttcaaaatttcatctttgctgtagtgaagtcaaggaaaaaaatactatctctgaatggttctaatgtgcatttcttttatttttagtcaagccgtatatagttcatgtgtactttttacaaatgaattttcaggccgaactgttcaaccaccaattagaaacagataaaggaatctcattggtgttatatttccagaacacatgcattaactagttagatacctgtgggctgggagtctggccaacacttgtcaaaagctttaaagagaaatcattctgagatccaaacaatggattcaccaacacactttcagaacttacaatagtggttgccagttcctgggttctgatccttgctgcttgccatcttgcaagtcatttatattttgttcatatgtaaaatggggtggttagcctatgtaaccctctacgctcttaaaaaacaaaaagaggtatttgtgccccttggccttgactgttctcacaggggccacgagagcttctgaaggacacgttggggctgtgaggaaaggccgttggctttaggggagggttgccatttctgctgaggaggctagctgtagggaaaatgagggcctctgaaaagtgatttggggagccctcatggagtaaagggtgctgctgactcttgccgctgcaggctggtgctctgtggctgagtcagatggaggtcaaagacaccaacgttggaccagctttgaaaggtggcaagatggggctgcctagcaacacccatgtcatttctgcctgtggtttgcacgagatccacccagctgtgaatatcacagaaggaattttcacgaactcatggacctttcattactccagaaatgagagcgatgacagagcgtaggcattgcatgtctctggctggtccctttaagacgacgatttgtcttgctgagctggggcaggctgtgttgggtttgggtattgacaccaaacagttctgattcacagcggtaacctccttcttatttccatttcattaattttcatcaaggcttaaacagccatgcatgtggcctggatttggggaattggggtggatctggacaattaaaagtcccttaagttttgcagtttatctctgagtagagcaagaccaaagaaaaaacccctcccacgcccctttgctgctgtgttagttgaagcgatttcagtgggattaattgactgctggaatgatttgcattttattgcccaggtctgctcactgggtcagaagatgtcataaaagcagaaaccccaggttgctgacagcctcagagacaacaggctgctccacaaagaaattggaccagccgttctcattctttataactcagcagtgtaataagccacatgtgtttccagccgacctgctctggctctgagagtcagattttgtgtttttccaggagcccaggaagcaagtaaaccccagtagaagttggagggctgaatttaagaaagaaagaaacctggagtctatagagaattggatgtggttggtaacccagtaggaattttctccaaggtgtgggtagaaatctcctccacgtgttgctgctgttaaacttgtaaaacgtttatagctgtaggttgttgttgttgatagcagggattagacactcctgctgggagacacgggtaacatgaatgggtgaggttggtcaggtggtgagtggagggaactgggctcccctggcccatgggagcctttgtgtggattaggaaaaggggccccttcctcccagtggaagccaacttggcccagctttgatttgcgcccctctgggccccctcagcaggtacaacctatccaacagcatgcaatggccctggcccctgaaagaggggaactctgctctgctcaggaccaagtttgtcacccaggggtatggacccagtgttgctgcagcttctggtttttggttttgtttttcaaaagaaactgaacatttgatttcatgtgtgtaaaatatcccaattttgaggctgggcacggtggcacacgcctgtaatcccagcactttgggaggccgaggcagatggatcacctgaggtcaggagtttccaaccagcctaacatggtgaaaccccgtctctactaaataccagaaacaaaaaaaaaaaaaaaaaaaaaaaatctgggcatggtggcgcatgcctgtaatccaagctacttgggaggttgagacaggagaatcacttgtacctgggagtcagaggttgcagtgagctgagatcacgatcgcgccattgcatcccagactgggcaacaagagcgaaactgtctcaaaaaaaaaaaaaagaaaagaaaaagaaacatccctatttccctattttggaatgtaagccatggcttcaatcttttttttctcttaaatactgttggagtcaaccaacagaggtgtgtgtgagggagcctaggctagaaggctgcagactctggtactgtattgtctaggagtctctaatatcccgctctcggccaaactgaaacaagagttgaggattccagaaatcttttgattcttacactcaaacaagcacacttttggaaaagaacaaatgctaagcatgatcctggtcactggtaaggtggagactgccctccaagcgaagggagtaacaggcagagaaagtgaggtacagggcttgtgagagagcaggtttactaagaaaggcaagcagagctaaccacgagggacaatttgctccaggtgggtattctaagtaggccctagtgagcgcttcctctttaattgccagacaaacaggaagagttccaggtcaccccctggggtgctgagaattgggaagaggaaggagcaatcctagagggtgctggcatgccagctccttggtggacagctgtgagccgtgctgtgtgctgcccagaggcctgtgatggctgactgcagccctgaccgtgtttggtcttccccgctgagcccagattgagtgcatatagatggctaattaaactctgaactgacaaacacacatgctggagaggctcccctttgaagagcaggagatcacagggacaatttcctgtttgccaatgtgcaacctcaatctcatcagtttgggactgtaagtttaaggcgtgctgatagccctcaacaccattcacctgttgcaagaagtgctaagcctggattggtgttgatctcttctgcccccaccccctaacgccccatttcactttcaggtgtgtgtgctttgaagtgggaggagagatgttagaccagtaaagctttaaggtctcagttaacctagagtctttttgtatgactctcttgagggaataagtagatatccttctgcccatgtgtgtatattcgcacatgtatccagatttccaaatgtatttgacaggtaaatgcaaatacctgtcagtgcaaatacaaatagagtcaacaatgaaattagtttggtttgagacctttgtgtgatccattccgcttctgagtgaccagttagttccgaaactgtgttgagtaatgatgtttcttctcaccagcaactaagaccaaattcttattttgaataacatatgttacatatggtagagatttaataaagatcagtgtttcagattctgtgatcactttatttgctttggagctctaagaaagatgcataagttcaaattgtggatttgccctgtattgaactgctgagaagacatttgtcaatgtgtgagtggtgttattgaggcagagaaggagcagagataaatttagccgaaaggggtatgaagttgcatacagttgctgatgtaaggtaccaatcatgtaaggtcgaaagataaacaatggctcttacaaaagagaagtattaaacaacatcacatcttcatctactatttttctactcttcatggttgccaggatgtgctgaaccaattaaatggcaagttgtgataactcttaatcttttggttctgatgcggtcattcctacaattctaccacaggattcaggtaggtaggtagagaaagagagagacacacacacacatagagacaggtacttttcaaaatccaggcattggggtgggaagaataggaatcagagagtaaatagacaaacatccaacccttgaggagtttacaatttagttggtggaggtggctttgtgtgttattttttaaagaagctatctcattactcttctgaaagtaagtaaggcatattttaaaaaattactccaacataatcgtaactgggcctttggccagcaacttaaacaggaaactctgtaggttaaaaaacacaatcaaagcataatatatgagccgtgtgtcttcaatgtctgtgagttgcattggtgggaaaatagaaaaagttgaaggctttagacttggcatagaaagcaggggtttgtttggcgtggcttccacatggcttctactcgaggattgtattgctggcatgtctacggcctgtggagtccctgctaaggacacttactgcatgtccctacacctctccgagttgttttccttatctgcagaatgtgctaataataaggatctcagaattgtttgtgttaaatgggataacgaataggcacaatgtcgctaaatgttatgctgtgggggggtctggagtcaggctgacctggtttcaaatgctggctcagcaacaacccagctgtgtgggcccgggcaaatcacttagcccctctgtgctttggtcttctcaaatgaagaactgggctgctaataccgtctcagtgttgctgtgaagagtaagtgagacggtgtatgtaagagcaaagcacagggtctggcctgggataaattttttaaatacattcgggggttattccctgctttgaatataatttgctctgtccaacctcctactgccattgtgaattgctgccgggactcatgccttcctctagctgtctgcttaagaggaccatgtgctgctcaatggaagatcttctggaggcttctgggaccttctcagagcaagccctgcagcctagcatccccttctcctcgggggccctgagggaagaagactctaaaacatccggttgctccaaaacatgccataaaaaccccaggaggaaagggccccattagcacctgcacatttggggacccttgtcagcaaaatggccaggagtttcctgctgaaaccccagggcatggcaggtttacggagacccttcattaagatgaattatgaacctgtgggtctctctggttccatttggcccaggctgggaggcagaggcccagctgccccgctggctgcactgcatgaaacctccttcctctcctcttcccaggctccttcccaccctgctgtgtaccccctacccttgtttaatgaaagagaaaagcactgcacccctccagggggccccagagcgggaggcagagttcaacctgagaaaattgttttcttgtaagtggcaggcacctggtgggccaggcctgacccaggcctttcgtgattgtgcagagttggctcctgtccttccctgttcccccaggccataaacaagtcctggagctggagcggggagccctggggaaggggggcgggggcagccacagtgctctctgtgcatttgttcctatctcatgtgacagctcaggggttatcctgttggcttctccagggtacctggttttttacatttttttttcttttttctttaaaaccatgaaatatgatcaatggttgttcagagaagccaagcacaaatgctctccagagcagtggttcttagggtcaacatgcttttaaattgcctgggtatccaggcatagcaggaaaagcactacagtgcagaaaggcagccagctgaggacgtaactgcagcatgcaggatagaagttaaacagtcagtcaggtcagccccggccacagagttggctgtatggtagagtggctgatggtttggggaagaggccaggtttgcaaaaaaaacagcttcctcagaggtgttaaggaggagacccatatttactaggcatctaccacgtgctttatagctctcacctcggaggccctagaacacagctggtgccggcaggctctggaaccagactccctgggatcaaatcccctgctcacaggatgtgggcaagtcaaatcatgtctcccagccgcagactccttgccttggccgtggaggagatcatagtacccacctccccagattaccttactgtgggttaaatgagatctatgcaaaagtccctagcacagtgcttggcacataaaggctcaatacctgctaaatgctattatttttattatcaccgacaaacacgctctccttagccaaacttgagtcaggctcctctgaggcctctttttgactaggccctgactttgggccctgactttggcctagttagtccagttttagcaagaagcctgttgagtgggtctggctagtatccccctagccttgatgtttcctcctagtaattttccttccaccagactcctacctgctccttagctatacatgtccacttgtccttatattggagttgagcccatctctctcccctatgcaaacccccgttgcagtagccccccttaaataaagtctttcttaccaattttaacaagtgtcgtgcataatctcctcctcttcttccttctccctcttctctctcttccctttgccattcctcttcctcctcttcttcttcactcttccctttgctcttcctcctcctccacctttcctcctccctccctcctcctcctccctccctcctcctcctccctcctcctcttccccttccctcttcctccctcctcctcctcttccccttccctcttcttccctcttcctcctcttctctcctcctcttccctcctcctcctcctcttccctcctcctcctcttccctcctcctcctcttccctcctcctcctcttccctcctcctcctcttccctcctcctcctcttccctcctcctcttctctcctccttcctcctcctcctccctcctcctcctccccttctctcctcctccttcctcctcctccttcttcctccttcttcctcctcctccttcctcctccctctcctccttcctcctcctccctccccccctcctcccccaccctttctccatcttccacctcaaagtttgggatcccatccctgaccctggtctcttagcctggacagtgggagttttcgtttcagctgatgaacttgacattttctctgcctggagaccaaggatgagaaggagaacttctttgtttagctagaactataagatctgaaaacaaaagagagctgaaagcaggcaggtgtggaacaacagcctcatccctttgattctgtgggttacacaccacctggacaaaccctggcctgaaaacttggggctccttaaagcattttttctcccagatagaaaaggaaagaattcatcagtgattcattgccttgagatacggcaggatgagtagccaaggatctgcttttctgtctctgtcactgtctctgtctcgccttctcttctttcttgtttagggagctaaaggcagagactgaattttaggaagcaatttttttttccaatctcctccagaattctgtgccatgagaaagcttaaaatccagtgtgataaaggattttgagtttgaactatggcatttaaaaaactaattaattcctccaagtcttagtttatttctttttgaaaacaaataataggaatatttcctagactacagctccttgaggacaggaattgggtttgttttccttatttcacttggcgtgtctggtatgatatctgccacaccatcagtgttcaataaatattggaatgaatacatatcacctaccacactgagtagctgaaattatgtattgagatattgtgtgcaaaagctcctagcacagttattttcattagtgctcattttttctgattttagacatatttcttagaaggatgaagatgaagggtaaagaaaggaaggtgataggagggagaagctggagagtaacaaggaaaacaaggaaatgagtgaagttggtgaagtaggaagggtgctgggtttgcgggagactggccttttattccccaccgggtctgtgatttctgcttggtcatttgactactctgaacctcaggttcctcttcagtaagatgggaatacaaatcttcactttatcggtggtgggtatccaaggagaaatatatttgtgaaggcagcccccagagttcctgacatgccttaggtacaaaacgacatgaaacctgaaggtggagaggaaaccagaaacagagcgtagaaaggagaataggaagccagggaatcttttggctggtttgcgttggacttgggcctggggagacattgcatttggacataagccccttatcgatgaaccctgtatttgtaacctgatgtgttgaaattgaagcagtgggtggttgaggtcaggagtgggtaggcacagcatgtgatccctgtgggtgaagcaaaatgaacacaaggccccagatcatgcccctagaaagtaaagcaaggtttcctaggattctccaatgcacagactcaagctgaatcttgatcctgtatgggttggagattgtggttgtcaatgaacttggcaaggcaggcaacaaactggctgtgtgtagagacacagccttaaaaaaggaaacttaaaaagtgttgctattttttaaaataatatttttttacaatgacactttttttttttttttttagtaattgaagaagttgtggacatttattctggaaattttggaaaatgtagaaaacacatataagcccatcaagtgataacccatctctccgtgacattttgatatacattgacccttgaacaacacaggggtttggggtggtgaccccccacacagtcaaaaatctctgtttaacttttgactccccgaaaacttagctactaatagcctaatgttgatcagaagccttactgataacataaacagttaatgaacagatattttatatgtattactgttttttgttttttgttttttgtttttttgagacggggtctcactctgtcacccaggctggagtgcagtggtgtgatctcggctcactgcaacctccgccctctgagttcaagtgattctcctgcctcagcttcccaagtagctgggattacaggcaccagccactgcaccaggctaattttttgtattttttcagtagagacgggttttcaccatcttggccaggctggtcttgaactcctgaccttgtgatccgcccgcctcagcctcccaaagtgctgggattacaggtgtgagccaccgcgcccggcctacatactgtattcttacaataaactagagaaaagaaaattattaggaaaaacacaaggaagagaaaatatacttacaattcattaaatggaaatggatcaccataaaggtcttcatccttgtcctcctcacatggagtaggctagagaggaggaagaagaggagagtttgttcttgctgtctcagggggacagaagcagaagaaaatccacatacaagtgatcccaggtagttcaaacctgtgttgttcaagggtcaactgtttatccctctagggtgtgtgtgtgtgtatgtgtgtgtgtgcgtgtgtgtatgagagagagggatttttgtgtgtgtgagagttgtataaaattggggcatatttttattatatcctaagtacttagttgtcccaagtctcatcaactgagtagcacttgattgactgtcaagtcctgtactcgatgaattgaactagattctatttctgcttagctcaagtctttaaatttaaaaagaatattcttgggaaaggttatattcacccacatcctacaaccagttctagagttttcaaggactagaatttccaaaaactgagttataaaatgttccctgtctctctcaggctctcaagacaaatttcttccaccctctctctcctcttaaagtaagtatgagatcagaaaaaaaagaaatccattttgacaatttctttcctgttctataaaaagaagttttagcaagctagagagagagaggtagggagaagggggaaaggagagagaaatgagggtagagacaaggcaaagatagtggaagaaaggaggcagggagatggagagggaagctctagtgctgcttttcttgctgtgaaacttggggaagtcactcattttactaatatttactgaatgcccattacatagcagccctgggttataatcacagcctcctgaacaatctctagtgctaatatatggtctctctgatctcttttaagtctgaaaaggccctcaattccttggcttttgaatagcactctttatgaactactggggaaaagtcaatgcatcttccttcctgtgatcccccagcaactcactttggccagtgccagaccaaggacaggagtcaccaccaggcccatcttctccagaatgaaacccccctgagggtcctgcccttggtgggccaccttcactctcatacagagaacagaggggctcagcttgttaaggaaacttcccttaacacctctcaccacattgcagattctcaaagagactgggaattgagcttatcacccctccccaagatgtagattctgtcccccaactcttctggcaggtattggctttatttaagcctgcagagacaaactaggttggtaggtaagtagatagacagacagacaaactatgtagatagatagacagaaggtctgcctttactagcatggctggagaaagtactagatgaaatccgaaagagaagcacagaagagccagatcatgtaggattttgcatgaaaggcaatgggaattctctgaagagtgtgctgtggttcatcattttcttttctccattgttctatctgcatataagaagccaagtctctcttttgcttccacctagaatgttgctgggcttgaaccaggctcaggcaacccatcacaaatttccttgaagaaagctcttatacagcccactccagcatagctaaaatttaggtaaacactttcctcactctgagttttagaagcaagtgtttcttaacaaaatgccttcaacttcacgatattttcgaatacagcttttattccaggatttagagacacagacaccacagcaccaaaacacaccagcagagaaagctccaggtcctcactcagtcctgatgcagacactttatttccctacgtatgtactttattgttgttgcttcaggaaaaatacatgcaaaaatcctggcatcaacagatcccctctttcctccccttcttaccctagtcacgattacttagactttcttgtagaataagaaaagatgactaaaatgtcaaaccccaccatcatcccaaaatgtctggtccaaaattagaacaaggagaagacaatcaatcactcccaggttacgaatcatgacccagccataagcagagtctctcggtgatgtattatgtttatatctgactctccttcttgacagttggccttctgtgatcagtttcctgcattgtaaaactactccagatgtgagaacagctcaatagcagagctctcagcctaattaattcaatcacaggatggtgattaagaggtcagcggtgacatttccagagtgcaccttctgtcttcccagcagttagcttgtcctaaggctccaaagccctcaggtggctctggagccacaggagcccttgggggccttgtcccaccctcaggtcttgcttcagctgtttgcaacaaggctgaccaagaaacaaggccacggccacagtttggtcctgctgggaagtgtaaatgtttccccgtaaaaatgttcaccctagatccaaacacaaaggagccagagttatgagtccctggtatgctgactttaattttgaaatccatacttaagtctgcatcttaggaggcagcagaaggaaaaggtgaaacttgagaccttcagaaaggtactcacctctccgagcttttactccctcaactgtaaaattgggtttctgatggttacttcataggatgtgttttaggaatacatgagttattaattgaaaaacttttgggacagtgcatagaaggtagaaacactccataatgctagctatcatcatcattattattactactactgttattattaatgtcatttatacctgagttgtatcactcaggatacacactcaagccacagaatctgacttagctgatttaagcagaaaaggaatgcgttaaaaatgatattgggtgacctacagaatttctctgagagctggaaaatgagacctggagaccacccagctagcaacaatacccaaaatacagtggagacttgccctgtgagggtaacactgttgcccctacccagctccagagattatagggtacatgttagacatcatccacctggggctctgaaaactactgctccctccatccaccactgccccagaacttaatcttgttcaaccagctgctgtctctagaaaggatttttccaaatccccacttctttgaggaattcactccttattcccttgcggtactattctgtctgattgataaaatatcaatggtgtgtccctccccttactgcaagagagtctgggaaagcacacatctgtctgtattgtccagctgcattgcactaaaggaattcctgaggttaggaaataaaagaggtttatttttgtgcacagttctgcaggctgtacaggaagtgtggtgcaagcatctgcttttggtgagggcctcagggagtttacaatcattgcagaaggtgaagggggagccttcacatcacatggcaagagaagaagcaaggttgtggggaggtgccaggctcttttaaaccgccagctctcaggtaaactcagggcaagaactcacccattaccatgggaatagcaccaagacattcatgagggatcaacctccatgacccaaacgcctcccactaggccccacctccaacattggagatcacattcaacatgagatttggaggggacaaacatccaaatcacatcactgacattgtctgattctactgtagaagacgactttgcctcccaccaagacccagagaatggagaattccccaaatgttggaagaaggaggtgcagtaccaaagatgagaacgaatgacagaggaggctgttgatgaggatgagggcttgtgtaagattgaaccttgtgcagcatggtgtgattattgtatatccaaggcccaactgaccaactggaccaccaggtgttcatcctgcggggctaaggattgtcctcttactcttttaatgtgctaatgcctctggaagtacatgagaattaggatattaaggtctctcccctcccttgttacatggagaaaccaagtaacaggaaggcactgggaaaagagaggtggcggtgtatgaaaaggagccttcaaagaaaagcatcacaagggacctgaaggatctggcctgaaggattcacgatttgcactctccctgcgttgtgtgagcacttaccaataaatattaaatgaatgtgctgtaattattggatgagtctctggccacctgaagctacccacatatttgaggtaggctgggatctgctgtggaggctgctggtatttcagcaagtggcgggcaacctttacagcaacagttgggtctcctgcagagtcaaatgctgctttgcaagaaggaaggtgttggagactgagagtgactaaaggtggcaggaagagctcccagatgctcagaccaggatttggcataaggctgcccaaaggattactctggccagtgcctccagccgtgcagaagatctggtatggcttctgtcttccgtggctgggcccctactgttctatgctgaccctgcccagctgaagtctagaaacatccctaacctcctccatgggtggctatgtcaaaatgatgataaaatgtgttcaggcaggctagatccagtacttgcatggtggctctgtttgatccacctgagactcttcagccttgaataagtcacatcttcatttgtactaacccttcctcacagtccctttggagctggagagacctggaatgaataatgtgagagttgcctttgtgcagagtcatccatgcctgaagtcatttgctcctctccacccattggggaaggactagcagatatttatttgcctcatttgacagatgaggcatctagggttcagaaagcttatgtgacttctctaaggtcacaaagtagtacattgaagataaatctcaagtctcctgtctcccagtctgatgccagtgcattttcaagtttttcaagcttatcattattctctgctgctccctggaacactcttacatgcatggacactaccaccatcaccaccatacccccatacctccatcactgcaggaagacccctctatttgatgcaatacttgcatgtggggaccatcttcctctccccctaactggttttggaatctggatgtggtcattctcatacataaaggatgctttggctatttggggatcaaagctgagctattgttctagttccaactcaagccaacttacatccaagcaacatcaaagggagcttttgttaccttctactgtctctctgtgacgttccaagagtcttgaacctatcctttctccccttcttcctctaaccaaaatgacccaatccctctgccctgcccactcatcccaccctcctaaccactcgcacaaggaattgataaggcaagagtggctatttcctgaacaagaggccaagcagtcattgtggtaactcaagaacacaaggtctatgtggtggaaagggaccgccaggcagtttccattgcaaccacgacttggattctacacttgcacacagtaaagattccatgtcaaaggactgccacaaaaactcccctgaagtggaggctggcattgctgggaggaaatatggagcacagcttcattagaggggctgaaaccaggaaagaaacttccagagtgagaaaaagctctcataatacatttttccactatagtcatttatcgctctgggtgccctccaccacagtaatcagtgttttatgaactacctttccctcaaacgctctttctcctctttattttgcccaaaataagagtttaattaaactctagatttctcctgctgctacttcttagagaaatatagttgaaggcactaggctgtggagaaatgattttattggttgcttctgtttataaagaagaagaaaaacaagcatagtccctggttttgtgttcattacatgagccccattcagggactgaagccaacatggcactttctgggggattaagtgtaaaaaggtgttttgatcgtgataaccccacttatcaaaaactaaccacaaatcacagcctgtaacaagcacagtctcaagactcagggcatatagcctcttaattatgttacctgtgaagtaagttctcttacattttacagatgggaaaactgaggcaggtttgagtacctgcccaaggtcccacagctaggaggtggggaagccaggattcaaagtcagtattctgtctccaaggaccaagtagctaacctctatggatgcttccttttaaggttaaaggttgatgacggttaaagtggctcagcaacatgtgattctaaatgtttttttaaggttaatttggaagttagggcttcaggcttttgttttttgtttttgttttttgtttcttttttttttttttttttgaggaaaatgtagagagcaagtctaggcaaatgttggtagacagcactatggaattcaacacccatagatttgggaactcaagtggtgaatctggcctttgcatctttaaataccttggaaggtcagattagcacagaaaccctgatgctgaaccgaacacttggtcctcccagttggcaaacattagctggttgaaatacttcctgatggaaataccgataacacgctgacaaaagttcaaacttgtttctaaaggtcatctcgactggcagagtaattagttcaagtttgccttttgcttttccctggtgagagttttagctgaaacctcagattttagccctctttgcaacatacagtcagtgacaagagacagcctgagattctacccaatacagagtgtgtggtcatcaaaaagtttctcttcatctgggccagaactggagttagacatttacactggaacttaatgatagcagcagcctctccagaggaaatctccacccagtccattacttggattccccaggatgccccttcaatcccagaaacatccagttacttcaaggacacatcactcgaacatactgcaaaccccacaataccacctgttgaagtcccctgagtccccctttctctgtattgcctgtcacctttcagccagctccctaggattctgctcaaccttcccttttacccaaaatctaatcagaccaatcctaccttccaaatatcacttttcatttccttttctcttcccactgctgtcaccttgtgcatgggctattacagctgtcctatctgcatcccaccatcctctgcactgcacgtggagtaacctttctgaaacctccattggagcttgacttgactccacttaacatctgaagatctttccgagggttccccactacccagactctcatcattgcatgtgttcctctgtggtctggtctggtgcctgcctgcttctctgttctcatggtgtacacactcaccacactccatttgcttcatattcactctgtctgtctgtctgtctgtccacctccctacctcccctctctccctcccctacttcctctcctcataccaaacctcttggtgatccccagtgggtcatgatgtataaacatttgcacataatattgcctctacctgtcataaccttgtgataaccttaccgcacatagagtgtgctaagtgtccagtgctcccagagacccctgggcatgcctctaggggaccactcctataggtctgagttccctcggcacccagggtagggccctctctctctagtgaattgcagagggcctgcacatgggaagtgctcacagcctgcctgcctccctgcctgtggaacaaatgggattgaactctgaccctaaaaggactgtgacggtgatctcctgggacatgcattctagggccctccaaggcagttcctcttcctcatatttcacctgtcgtgtgcatgtcactcctctctcgactgtgaaatgggagcacctggaaggtggtacccagcagcaatggacggtctctggagtcagactggcactccagacccctctcaggcactgaggagttgtgtgcccccttaatatgtgccaaactcactttcctcaactgtaaattgggggtggtcattgttatcacctctaaggattgttgcaaggattaactgagataatttgcataaagcacatagtctacatctttgctcttcaataaagggcagccattgctttgttatttcctagctgtaccttctacttgattgtggtagggttcatgcctatccacttatttattctatgtgttgtaaagacctaaaagaaacacccaataaatatattaattgaaatttaattgccactaagtcaccactactttagaaggtaaacttttcctatgggatcataataaaaggattctgcattttttttttgaggcttttaaaatgtggatatttaagagggtttttcccgtaatgagtatgataaaggcactgtggcagagcttctccagctgggtgggttgtgttgtgtgtgcttagtgcatgcttgagcccagagatgtcacaagaagccatcctgaaacttgctgggggttggcctacatgcattgttgggaacattgtccttttcaggattcactgaagaattttctgtcaaccctgagttgccagaaaggattatatttctataaaatgagtgctatgtttggaaattttctctctttgctttggccactaggaagctgagtataatatgcagcccatcttaaacgaaaccctctggtgatcaacatggtgttctgacttggccccaggcttcgtcttagtgatctacattattctcctatacttagtctctttacctcagcacctagctcgatacctggctaacgggtgaaaaattcttaaccagtctatttcccaaagtctatttaccaacagactgctcttcatacatttttctatacttgtttcatatattttttggaaaatggcgagatataagtgaagaaatgttatattaacatttttttctttctcttcctctcttttttcttccctcatctgtcttcttaaaacatagtgagagttcccttacagcagatttattgtacttttacaactgagaggggaatagtgcttatcagcttgactggtggaaaatttccaagctgcacagttcactagtttatattacctaatagagagataaataagccatgattcttcttaaggactggcttttaattagatttttaatggatcctctttgactttcccaagcataagtactgctgtattagttcattattgtgattaaaagcagctaataattatcataactaaataattttcctcaagtgtgccagcccagtttgatgccctgagcgttagcagccgctggcctaagcctgtctctttttctttgctgtgcatagcagagcagctattttgagttggaggctgggaagcctgcagacataggaaggcacaagggacagaaagtgccagctgtcagagcctgtgtcttgatgctctgtgtggtgctgcttgaaacaccctccatttcactcctctgatgtctcaaattttaacccaactggaatatctccccaagtatctttaggtcactagtcacggcataagtcaggatgcccaagtagcaggaggtttatgagctgcaaaaggctcattcagaggctccgcaacatcagcattggactgagaatcaaacttgcagcatccacttctcagcctcccagccttttgccgtggaggcacagagatggatggattgtcccaggaaccacactgcctatgtggggtaattattcttcattcttttttgttgttgttttatttttttttgaggtggagtctcgctgagatggccaggctgaagtgcaatggtgtgatctctgctcactgcaacttctgcttcccaggttcaagcaattctcctgcctcagcctcctgagtagctgggactacagttgtgtgccaccatgcctaatttttgtatttttagtagagacagggttttaacatgttagccaggctggtcccaaactcctgacctcaggtgatccacccacctcagcctcccaaagtgctgggattacaaacatgagccactgtacccggccaattcgtccgtcattctttacctttttaagaatataagaataaacaaagatgtcatggtggaaatttttgaaaatgactaacaggaagcgaataataatcacaattagttttattaccaatattgtgtgtttgttcttcttgtctttaggcatgtatgtcttgtcttttttttttttttttttttcaggaaagggatcatggtgttgccttagcaatatatcatgaatgtttttccatgtcattaaattgtcttccacaaaatcatttcttaagttcagccaagtaggtcattatataaatgtaccataacttattaatctctgccttttgttggacaattcagatgattttaagacttgtattatattgtaagcaacatttcaattaatatcctttttaaaaaaatatttgagtataccatgatgatttccttgggcgaaaactttacatgccggtcaaagggagtggagaatgttaatgcttttgctatatagtaccaaattgccttctagaaaaatggagcaaagtaaacttccactagcagggtatgaggattgattacttcttcatatgttgtccaacactgggaattatcattgttatcattaattattttcctaggtttcaaggcacagggaatggtggttgatttaatttgcactttttttggtcttgtaagttgagcgttttttcatgcatatgttggccatttgaatttcttattttgcagattgcctcctcttgttctttgcccattttgggctgtgatgttaattttggtgtgattatcttttgaaggattcagatggtcctactttaccaaaaataattttccccacttactgtctgtattacctcatactaaaggggaagataggattgaccctgggcttgggactggagaaatgtaatggtagcactgcaatggtaccactgcagtcagaatataatttaacaaattccagactgctcaaaaatagtttttacattttagtgccagctatggttgtatttgcattattttagttagactgtgtttgagtcctggatttgccatttactagctttgtgagcttgggccaggttaccgcacctctctgaggctcagtttcttcatctgtcaactggaatgacacctgccttgcacactttttgctagtaacaaatgtgatgaagttcatgaaacatagtacctggcacaaggatggcagccattaagagatatttaagagactatatgtatgatacctaattttctactcaaacgtgttactttaaagtagccttgatggaatcataaaggtctccctcaccctctgttcctccctctttgctgaagggacagagaagcaggggtgcatgctatgttgggaagaagccttccagctcctatggaatgggctatccgggaggatttgcagagatcttgccctcgttgccccacagtggcatgggaatagcagtgctcccaggacccaaggatgcctttgggagggtgacagggccttcacattccttagcaatgagcaggatgtctgatgtgacgaagacaaaggtcaagtttaaaagaggactgtcttgatggccaggctcctcccattcattccccagagagacaagtatagaacttctggggacaccaggacgtgggctcaactctacaaacacttcagaggggccgcccaagtggaggggaatggatttacaaggactttgacatggaccttgggctctgctctgtgtgatggcttccatattaaccatttggcatcaaatggggaatatttcttctatcattcttttttttattctagcaggctgtgtgatacactagacggtagctgccaccaaggtgaatactgaatgttcatcagacagttggagggcagcagtgactgcgtttgaagcaggtttgaaaagggcactggtcttactttatatgcacatctaagattctctaaggaatcctctgagcattttaggtggtatctgcaggtttcgctttgcacctttccactaatatgacatatgactgtttaaccatatgaacttgtctcctctgtgcttctggttcttcaaggaccatactaataatttccataccttcctcaaaggcaaagttttgaggataaaattaaatagtgggaatgaaaggtcagaactctttgtgtcaaggcaagcaattaggctgggttctagtttcgaaactgccagggaaaagtcctctgaagctcttatttccgtttcattaaaatgaggaggtcgggctggaaaatctctttggtccctcataggtgtaacgttctgggagtctatatgaaatattcaaaaggattcatcaacagcaaatccctagaacatagtgctcctagaattgaatcaatattgaaggaaatccagtgtctcgggacagaagatgcacagagaagagccggactgacctttcttgtagctgcagtcacaagagacttatggcacgggaagccgtaacactcatcatacagccagttattgcatgtgaagtgtgtgaaatttggcagcagaagaacctgggttcaaattttggctctgttagtttccagctatgtaacctaaaacaagtcattttacatccctggcctcagtttccatctctgtgaggaaaaaagaaaaaggacaatactcatgctgggtcttgtgagtggcaaataagatcatatctaaaaatactggcatattatagggcctcacacatagtgggcattcaccaatgtgaccgccattgcttttattggactaaatcagagaagacaagtttccatttcaaccacccaaagaattaagaggcagtggctcggagccaagaatacttcaagcaggcaaagaatgtttgttctgtcccttgcctcccctcccgacttcagttagagtcctttcaggaagtcagaggtgggtcacagggttttaataattccagaaagagcatctgtttatctgtttaaaggagagcaacagaatccaattttctggcaccaagcagaatggaaaggtgttcatttgtaatgggctggtttcaggccttaagcccttcccttttgaaaataatttaccctgctaattacatcatattaaccaactactcccggtatagattaaaggactgctttttcaaatcattctataaattaaaagcagtcctcccagatacatgatttcatgcataaatacggcatttgtgttgtcagaatttatgttgagaggaaatggaggaaatgtatccttaaggaaatattttgcagtagttgttaacaccttccactccttctgctcagtgcttctcgtaccataatataaatgtgcaagctgttagcgcgagatgaacattccggagcttcaggggccacctgcctgtgtggctgacttgttatttaaattccctttgcatttcacagatttaaatactgccagggtcctgatttatggtgtccgcatcacacacataaaactttcactaggatctccctgtttctcactcacgcacacgggaggaagtcaattgtggccacaggtggaatagattgtggagcaagtaatccccagcagggtgtaaagaccagaggggtgtgcccccgaggcgggtcagaaagcagcagggcttgggagcctcagttccaggaaatctgtccctacccttcctgtcagccacaagagaatcgagggaatgtgggaaggattgaaggggtagagacatttaagagaaggaatgctgaatgggatcatctggtcctggtaggaaggaaacttccagcccctccttccagcgctgggtctcatggctatcaaggggcaagcctgtaagaagcaatcaaagcaaataactgacgaattcaggactgaccctgaaagtctgccctgaatcatgcactgaccctcatgcagccggcattaaggccagtcatggtcctctgtgcagggctggcacgggggctcaattggcacttatgattacaaacttcgtccctctaggtatttacagctgacaatgtgctaatttatccaagcttcgtggttaagcttggcagaccagcaaatgcacccaaatgcaccaacaggtacatttcgaaaacagttcaaacaagaacagtttatattacaaaatgtgagaaacatcttagaaaaggcttgattttgaacaggtttatacacacttgcacacacagcctcttgctggtgctgttcaccttcctggacattcctgtcattcttggttaaaggtctttttcttccccagctactttgagaatttctccatatgggaaaggcagggaaggaacatgaagggggaaatgatggtcacaacaacttactggacccaactctgagccagggggactcatgggtaaagaaacctaacaggcagaatctgtgctcttatggaatttacactgttttgaggagagagaccatacaaaccaaacacatgagtaaatgaaatagtttccacaaagtgtaaaataggaagacaatgcaataggatgatacactagtatctaacggcaggagcaagaagataggacaggcgtggaaagtggaagggacagaaagtcacctggagcacagtgagtgagggcagaggaagtggacagataaaatcagagaagaaggcagaggccaggccttctagggccaaggcaggaactcaaagatgatgagtccttgcctacactatgaaggtaaggagaaggattaagtcgttaccaggtctattcctgggtgtctatgtagcattcatgtggcacccaaagccttaataagcactaaacaaatggggtagatttatcttatgtcactagagattctgcttagaagggtgagtggtgaatgcctgtcaaattaactgtctagagttctttctgggatggtataaattctttattttttatttatgtatttatttttttgctgagacagagtctcgctctgtcgcccaggctggagtgcagtggcgtgatctcggctcactgccagctctgcctcctgggttcacaccattctcctgtctcagcctcccgagtagctgggactgcaggcacccaccaccacgcccgtctaattttttgtgtttttagtagagacggggtttcaccatgttagccaggatggtctcgatctcctgacctcacgattggggtggcgtaaattctaactgtccccaaggcagtgggatagactcagtctctctggttccctttctggccccagagggtagggagtggggtggggaatgattctatcatcatgatcttcacctccagctggaggggaggggattgtttctgagggtatccgtcatgatctgagatgaatgatgatccagcattttcccaggaagggctggaagcatcccagcgatgctggcttcatcgttgtcctagtccaggccctcatgcatccttgcgctgcatcgtgcatggcttatacaacagaaacaaagctagcctggaccttccctgcatctaactgggcatggctcagttagagcccttgtagtaaggtcaggtagagatgggccaggcattaggtgccacgcagatgtgtctctccaccagtcctcgccttgggtgataacaagatgctttgcgatcagaaccatgggtggattgtagggagccgaggggcagctattgggcctctgcctaagaatagcgttcatagttatggctgattgaggggagaattatgaagagtgaatacagacctgaggggcaagcaaacctgggttctggtccagggaaggcctctagtcaacatccagccacctgcacagcatcttccagcacagagagacatcggtcagagcttcactctccctggtcccttggaccaaactgctgaagagagcccagtgacaccatagtaaagggtcattttccaccctggctaagttgaaaatccctctaagtcagccaggaagaaaacattcatgggaaaatgtaagtattgcttctgtttattaaatatttattctagaaccgtgctagtggattatttaattgaacacccacagcatcccaacaaggtagattctatttatattcatgctttgcaataaggaaaccggggtgcagggaggtgacaaagttgctcaaaaacacccagcttaggaagcaactgcacaggacttgagtcctgttgactctgaccccacagcccctgtggataccactaaaggtcccatttagattggaaaagagattcagcatgagcagacagctagaggggccatgattttcccagaggcacttggacagccattcatttttctaaacccagcttcaagtggactcagacccggtatggacactgctccactcagcccaatgagcattctctcatcctgttgttcatagaacttctctgcctgagctctgctcctggtcagccttaggctgaaattcccccaggagcaggggctaaccctgtgtcacttggtgcaatagagaagaggagacatagagcctgatgcagactcccagctaatgacgctcacaccccagttgcagctcatctccagggaagtggtgacataaagcaatacacaagattagaaaactcacatgcccacagtgctgtgcaggttacctgagtgactgaagcagctgtcttagtccatttgggctgatatagactgggtagttcataagcaacaaaatttatttctcagtgttttttgtttgtttgtttgtttgtttgtttgagatggagtcttgctctgtcacccaggctggagtacaatggtgcgatcttggctcactgcaacctctacctcctgggttcaagtgattctcctgcctcagcctcccaagtagctgggactacaggtgtgtgtgccaccacacccagctaatctttgtatttttagtagagacagggtttcaccgtgttgaccaagctggtcttgagctcctgacttcagatgattcaccggccttggcctcccaaagggctgggattacagccatgagccgctgcgcgtggcctatttcaaacagttctagacactggaagttccagatcaggatgccagtgtggtcaggttctggggagggccattattctgggctgcagatggctggcttctttctgtgtcctcacatggccaaaaaaggatgaaagagctctctagggtctctttttataagggcactaatctcattcaaaaaggctctgcctcatgacctaatcatctcccaaaggccctgcctcttaacatatcactttgggcattagaatttcaatatatgaatttgaggggaactcaaacattcagaccatagccccagccaaatggagtctgttccccttcaaagggcagctcctcctcagccttcaacctgctgggcctcgtggcaacgtgggactggtagactcaggccttttcattttattttaagccaagtcagacatttagtttttaaaggtgaaatctcacatctttaaaatgttggcaaccattttaaaaatttgtttttaatgttgtgctgggcatgctaattacatgtgtgggctggaagaggcccgtttgaggcttctacagtgtagacatggataaggggctttgggaccgagagcattgggttcaaatcactgcccttctactttctggcagtgcaactcaggtaaacgacttgatgtctggataaagtggggatcctactcccacctggcaggctgtgctgtaggattgaatgggtaaggcttacaaagagcctgggacagtgcctggtgcttaaagaatgcggcttttgttgttatcctcattctggagtatgtgtgaacggtgagctccctgtctctgccccactttgctcctagaggggggacagtgccttttttcacttggtgtcttccatagaatctctgtggtcttctcttttggtcttcacagccaaagaaattgcaggcttctgtttgtcaggaggattctgacagtgactctaccaagaagtcaaaggatgcctagagctggcgattagctcccttggcaccagctgaaggatgaaagcaagtgttcttggagctcatgcttgaaaataaaccctccaattcagggcttctcagctcccttggcaaactctccagcatttgggtccctggctttggacactgcaacgtccttactatgtttggtttgtgcaaaggtgcccaacatggtggcttcctggcctggaatattctgttgctcttccttgatactctctagagcaacaggaagtccttctcctgagagatgcattttccaaacctgaggcatcttattctttcttctgatctcagccttccatttagatttcatcaaaggagaaagaagtagaggacttacttaccaaggtgtggtatatccagagtaggaaacagattagaaatgaatgcaatccatagaaagccaaactgcttcacatcctgtcccctcacaggaaagcattcagacagaaccacagaccagcagccacaaggaatgcttttgacactgtgacatgatctcaatatttaaaacagcttctcaaaacttaaagtgcaggatttcattcataaaacacaacaagctttctctgaattttttctatatctcatatatcaggcagcaggcccctgttccccagcttctcccaaatatccctccaaatgtgtcctgagccgctcttgcctccttgacctgcgttcttacctttcagatctagtttctttctaactaagcctttccaatggaaaccatactcaccttcctggcttcccttgtttggtggccctcccggaaccctaagcagcacagtaagcaagcaggtggacaaagaatcggtgttggaatactagtggggagaaaggctgtgatggtatttgcatctgcactttgccgcatggcattaacacagtggatgtcacaaggctcggggagaagcggtctgatggtagcttttaataggcagaacatctgagaagtcacgtgagaagaccttccgtgcaagaacacagcagtccctgcatctgcaatagcgctcgtctcatttgacactgtaggaaattccatgctttataccttacagggtggggtcgatggtttaataactcactacatgctggggcaagcaaccagggtccctgggtattttctatagctgatttcatcttgatcttaagcctctatcagccaaaagagaagggagaaaactctacaccttccccataaaagaaagctgtgtctttttgcttaagtggcctttttggggtgaatgctcagcatttcaggggcactcctcattttcttaaccaagaagtcacagaggtcgccccacatagcagggtggagtgtggagtgtgagccttatcatgtgctggtgcatcctttctcaccccagtctatggctgagggtgctgtggtcccttcttctggcaccgtggggagtcatgataaccctactccaccttctgcccttccacattcggccagtgccgtgtccagaccccagcatatccctttctctgcttctactgagaggtcctcgcacgcctgcttcctagtagagcctctgactccctattcttagccaccctctacatccccctctgggagcttatgggcactttcagacgctgcttttgcactctatttctggattctctctgcttaacctcaccataccagcatttctgggctcacctggctgccccatgctggtgccaggccactaagcaaagcgggcttccagaaaagggaagggactttgtacagcctcttcccagtttctttgacccatctttccagacctcagctcagggttgtgggggaactggacatcttcccctctcccctaagtctcatccactctgaatttctcccctgtggttcagaagagcatgcttttcccttcttgtttaagataacttatcactatgttagaccctccttctcaacttccctaggtcacatgtgggagctacctacccattcctttcttggaatatcaaacctcaatgtggccttaatggcagataggacatagatggaagatcttgcttaccacaaaaagtgaaatatatcagaaaatatattgacaccatttatttcacttacaacatgcctgctcttgtcattatggagacaggtaaggcagatagcattttcttactttacagctgagaaaatgaggctcagagaggttaagagacccagcaaggtcacacagcttgtggggggcatagtcaagaagaacatgtgagcgtttggactctgtaagagtattctttctgtggccctgggccacctcccctgctagggctctcttttcctccatgggactgtgaagtcagccacagggcaccgtcagctccgccaatctgctcccttgtctcttaaagtgattataaagtagaaacgatgaaatccacagctgcaggaacagtaggaattctgcctcaaataggcatgaatcctggaagccagcatttaatgctgaagtcactacgaacttcatttaatctttttttttttttaagagatcgccagctatgaatgtctggaaggtggccaacgatccattataagcactaaataatttgtaagtcaaacctatcgatggcaatgtggtgtcaaaatcactcaacagtgttcattgaaaagacaaatcagttatgcctgggcctctgcaaaggtggtttgggaaggcagcagatggtcatgtaagtatgcgtaaacatatatatttaatggactgcagaaggaacaaaaactggcataataattgaggaatcttttggactctacaatttttcttgctgggaaacctgcccagccaagaatccacaaggcctgtgaatcaagtcggcaccctgtcctcatccactgagcttatgaaaaaatgagggtttgactgctgatagcaaaggttccaaacctactgagacctcccttctgcataatgcttttacctgagaggagaagattttatacccccactccactgcctcctccgagccccttcatcttgttcctggacttctacaaaacctgcctaaccagactcccagactccactctgcccctctataatctatattcaaggacaagccagggtggtcttttgagaaccaaagtcagatcatgttatgcctcttgctcaagcctgtcttctctggtttaccattgtatgtagaataaaattcttaatttcgtatgatggccaacacagccctccctgttttgaacactgtctacttctccaacttccttctttttcttttttcttttttttttttcctccgagacagagtttcactctgtcgccaggctggagtgcagtggtgcaatcttggctcactgcaaccaccgcctcccgggttcaaaccattctctgcctcagcctcccgagtagctggcactacagctaccacacccagctaatttttgtatttttagtagagatggggtttcaccatgttggccaggatggtctcgatctcttgacctatgatccacccgccttggcctcccaaagtgctgggattacaggcgtgagccactgcgcccgaccttctccaacttctttcatacctttgcccaactctctccctaagccttgacctcttcctggcctttttgctgttacttgaataggtcaagatgtccctgcctccggccctttgctcaagcttggcctgagtgtcccgctttcaactttgcacatcattcaactctaatctcaaatgtcacctcccagagaggcctttcctaaccagtcattctctgttgtattactgtgttttgtttctattaccgcgtaactcctaaaatatttacatgattactatccatctttctaatctacaatagaaagttccagaaagcagggacttggtcttattcacagctatatcaatggtacctagagggtcacttgtctcatggctggcatcctcatgaaacttgtttattgactgggctactcctttcttccccaaaactgatggtctcctttaccagttgagcaacaaccatattgaagtttaccagtgatccaatcatttgtttttgtaaagtcatctgtttaacaagaatttactaatttcctaccattttccagcccatatgctaggcatgagggccacagagcagcctctgaccaccaagaattcaagatctggaaaagtccatgatacctgttcaatgtgggaagaaccagaacaaatgtgtgcattgtgtactcagataatgggaccccctaggccaggggtttccagggaggccttcagaaggagatagaccttgagctgtaccttggaggatgtgtaggagttaggcaaacaggggcttgaagtattctaagcgtaggaaaagcaaatattcagagcccaagagaggctggcagacgtcgttccgcatgcctggggtaaaggattccctgtaggagaggcagacgggttggagtgggactggcctttgtaatattaaggagcttggactttactttgaaataattataaactcgtaagaaggggagggacttagggttgcgttttgggaagatcactttggccatgagggagaggatgtatcggaggagaaaacaaaggagacagagacctgaattgcctggacaagaggggtgtaatagtttcctagggctgcagaaacaaatcaccacaaagtgggtggttaaaagcaatggaaatgtattctctcacagttctgcaggatagaagtccaaaatccaggtgtggacagggccaggctctctccaaagcctctagggaaggatctttccttgcctctcccagcttctggtagcccgcccccagtattctttggtttgtggccgcatcatcccaatctccgcttctatcttcacattgccaccttttttttttttttttttttagtgtctctctcttcatatggcattttcctcctcttattggaacaccagtcatgttggattaaggcccacactaatagcctcaatttgacttcatctgcatagaccctatttttttttcttttcttgagagagagtctcactctgtcaaccaggctggagtgcagtggcatgatgttggctcactgcaacctctgcctcccgggttcaagagattctcctgcctcagcttcccgagtagctgggattacaggcgtgcgccaccaggcctggctaacttttgtattttttttagtagagatggggtttcaccatgttggccaggctggtctaaaactcctgacctgaggtgatctgcccacctcagcctcccaaagtgcagagattataggcatgagccactgcacctgttccctattttgaaataaggtcacattcacaggaaccagggctttgggccacaacataatcttttggggggacataattcacctgtaacagggagtgaatgaaaagaagggggcggggaattccagagttgaatagagttggattcagtgagtggtggaaactaaacagatgtaaatgcttaaaggagagagggtaatctagaaagattcccagattttcggtttgtgcaatccggtggagggtgaaactattcattgaaatatagactatatcatataagacagaacccaaggtccctgtttcttttctacaaatacttagcacattattcaaagcaatcttagtagcccaaagaactcccctagagaggaagaaatggaagaaatggcaaaacaaaaaaaggcaactgcatgagcaaagcaagagggaacgttagcttcctccaagtttagaccagaagcagaaatgaaaattgagttactgaactcaattcatgtcttaaaagttagagccacagacacaatcagagttttccttgtggaagaaaggaaaggaaacctgttttcccagcctcatctattgacccttcattcattctggagccaggttggaatcaatagtgtcttgtttggtttgaaatccttagaaaagggaatccaactcccaactgtagctacagagcttatttcagaagagcattagcatgcgcaggaagcagcagaccctacaggtataacaccttcttctttggccctcataatccaggtcttgttctgatgtggttcatccggtgccgatagctcaacctctttgatgtccagaccaaatgtggcccactttcctttgggcatcggtgcctttcagcctgtttacctggaggcggtggttctctgcaacatctgcctatcctttgaaacagagtggggtgagggagggtgggtgctccccaggaaaaggccgattgaatttgcaggcaccagacagaggtgatgatgcagtatttcagcagtggtctgagaggtagcttgggtagcgtggagtgaaatccaccttcctaccacttaaaacccagttcaacctcagaggaccgcaatagaatgatagcttattgggactgagacattgtcagggacaaggccaaagaggatgtgacctaccacatgttacacattgttgacagacaggcttactggtgctcacactccatattctttttgacattctccttccctcctgttcttctgacagttgggaagtcttacgtggcctcgctgcctttaacaagctttctgttgcctgagggggaaaaccacctctgctcttaacctgacccagctaattggccctggggaagtaaattatgtagaaagaagagccctccctgactcttgccacaaatatctcctaactataggagacactgagagtgaccacagccttcttataaatctgttgtggcctcatgacctctgagcaataataaatagtactttcacaggccgtcctgtagatatgaagatgttttgtgagaacatctggcattcattgactcaggaaaagaaagaaaaaaatcacaagccttgggacagaatttcattttcttttcatgtttccatgtgggtgaaggagccctctctgtctttaaccaaatgtgggatgggggtatatgagctccctttcaagttttaaaggggaaataaaaatgcacacgcatttctgtgaagaagttctctggctggaggggggcatctttctgaagggggctggggatgtccggttattgtaactagccttcagtacatcgcctttccttctggtcctgtgaagttttctctgtgctgccctctgggaagacctgggttgcagatgatggattctgtaggttggtttggggacaccaaggcgtgcaagcttgaaatggatgagagccgacagtgctagtgttctctctgcctctccctctttcactctcttcctttctttctgtctctccccctctctccagtgctgtagaacgacctggctcataagccctaacaaccacagatttaggctctccttggaatgcagtggaaactcaaagctcatttctgcagggtggattttccactttcccacaggatgagcataactctttgcccatacaaaagctggctgctctgtgatcagtgagtttaaatcagaataggtcttaggtagccaaagtggcttaaaatgttagcaaacagtgggatcccttttaatttttaaagggaactctaattctaccctttatgacttggttaattatcctgggcccctgaacagctgtctattgattccaattaacatgattgacatctcctctggaaggtaaaagctaatcaactacagcatctcccactgagaattcatttccttcttggagtcactcctgggcaggaggaaacttaaatatgagaatcaagattcagcacccacagctctgatttactcttttatatacagcctcacagtatcttgtagaggggaaaaaaaaaaaggctagaaatgtttaaaaatggcagtgtatttttgaaccaaactagagttaattcagttggctttcactttccttcctatttttcgtgaatctaaattgatcccttgaatgtttgatttccttttcctttccggttctgaaggacccacaaagtctacttttattgcttctgacaacaagtttagaagttgacatgaacttcctggtgcagccaaccttcaatttttcatctccgttttgcagtgatttagatgcagatcttgatggtttgctagtgacgttttcagataaaacaaaagccagtaagagagaagttatgtcagataaccaaccagggtccataagacagcagagcgctggaaggctgctgaatctaaatgcgaaacataaatagtgccaacaaattcattcaacacatatttctgcctattgtgtgccaggtacatggaaatttctggaagggtggaatgtgatctcgccgtgatacctatggcgtctttccatgtgtattcttcctcttcagaaaggaaatctacacgttacagttggcagcaagctcaacgtgaagtgttatatggtcgccaaaaaaaaaaaagtgctattataggctgcgtagtatccagttcaaagggggcagtggttaaacaaatcctaacattaattggcattttatttgactataaatttcataagggcagacacaacgttggtcttgctgctcaccacattccaataacctagctcagggcttggcacaccatggacactgaatagatatttgatgaatgaaccaattatctgggcacagacccaatcgtggcaaagaaacagaggccaactttgtgctgggtaagctggtcagataggataattatgggatggatgggtggatagactgggtaaagtgacatcagaggaagtgagatgagattttgttttggacaaataagatggggataactgataatgggcaaataaaactcaaggttcactctcaagaaagagctcacaggctttggggatttgtgcatgaggagatacagtgctgcattcctaactgtcgagtgactctgctttaattaggtttgggcagtaagtaggaagaacagtaagagactccttaacatcagacagtgtggcccagcaaacggcctgctggatgtgtctattctgttctgttgctgactgtagaaaacgcacccctcttcctacacacctcttcttttatctctctttctggagccatcacatttacttagaggagaaatggggaggaggggaagcagccaggaaaaaaaatagatggctcaactatacccagaaaccagtgtccaagtctcatgttgcaaggccagcacctccctagtaaagatcaaatgcttatagtggcatttcttggccaagatagagccaacaacagcaaataaaaacaataccacaaacccaccctgggaactacagaactcttgtattttgtttctcttctgcccactttagagtttaggtttctgtctagcagatttaagtgtgttgcctatcattcgtcaaccccaaatgccagtttatgtatcttaatgtcacttgtccttaccgctacaatagatcttcagacaattagaagccgcccggcatcctgcagggagtctagggccctaggctggacttcgtggaaagaaactagagaatttctgatgttctgttcctgactatttgaaaaattacagcgctctctacatttcagataattctttccagttctccactgctgtcactggttggtctttcttgtttatgtagctttgctgtgttgggggaaggtgggcaggagagacgttaacggcataacctaagagaacaaaagttaagcaaagcaacatcgaattccagtaaatatgtaggttgattcctgctgacttcctctggttaccttagcacctgtcaaagccccgagacctcttattttggaggaaccccctcccccaccacgtcgaacatagtgaattacacttagatcacacattagatgtagcatacagaaaaatagaaacaattattattttgtttcttgtaattttaactttatactttttgtatactggggccagtgtaattttttccaactctacacgtttgtatttgcccccaaaaagctcatgtgacataggtcttgactaacatgggtaatggccctgcctgccgtagccctggcgccctcacaggctattgacttttctcgaagaaactgcccgactattctctccattcagtcaaccaggattttcagtcatccactgaatgtccaatactatgctggttgtggcgtcactctcaacttctaagggcctctcccaaagctctggcctggtcattgcttagcctactctgaaactccatatttcaagaagagtatcttaattaagtggggaatttttccaagcagctgaaccaatggggcaaggggtctgggtttgctttcccagactgtgattcgttccagaagaatcctataccacctccagagatgagatagaggcaatgtctgtaacaacttaatacggctgttattatccgaggcaaaaatgctgtgtggcatttaatgtgtattactgtactgggacttgggtatgatgttgctttttatactcaaaaaggacaagctattttgagtacttggtagcaacactggaagaagtctgtaaggcaaactaggtaactactgtgtgaatggctacgccgccggtgatgcctgacttctgttgtggctggtttaaggaaatccatgttctttattgtcatacctgatctgtcaccctaaccaaattaccagcttcaccagggcagagattatcttagagcttgaggactctattcagtaaaaggtcataaaaatggtaataagaaacaataacaaaagttagcatttctggaatgcttccgttatgcctggtttgttatgagaatgttttacacctcatcccactggtcagatattatagctctatgtagatgagcttatgattctccgtttaaggatgaggaaatctgaggcttggaggggttcaagaagccatccaagaccacccatcgtcagagagtgtgttttcaaaccttgcttgtctgctgctaagcctgtgctttcagcctcatcagtttctcctttctagcttgaattttagtcaaggggcatcagaagaaagaaattgaggtttgggggcaattagtggatcttgagagcagtgacagagcagagtttgacatagtttcttccatttggttttctctttttttccccctccttcctcctgctttcttccttccacaagcatctaatcgatgcttgtggcaccatgctaagttgctgtgagacagagatgactgtcacctagttcctgctctggagctgctcaggacctagaagaggatatgacgatgcatcttttcaggaaaacgggctaaggaccctcatagacctacagctacatcctggtctgccagagcacagcgggaagagcagctggggaagtgaggggaacaagtatcccagccaaaaaaagaaaaaagacagcattgtatatgaaggcccccagaatgaaagcacataacctattcagggagtgacagtgtagtcgggggagtttggtcagcccagctggactgaaggagtgatcatgggagatgatggacataaggctagatggaagggtaggctccatctaggtctccagatggaagggtaggttccatctaggtctccagatggaagggtaggttccatctaggtctccagatggaacctccagtctgccgtgaagacctctggagactactgaaggcagagaccccaataaagatgggaataagggcctgtgttaggacagcgggtagcagagatgggatgaatggttagattcaaaaggcatttcagctgtaaaatcagcagagcttggagacagatttgaaagcgggagaagaggtcaaggggaaaatgaatatgagggttttagctgaagcggtagggtagatgagggacattgttcaccaggataaggaggatggttgcaggaggatccagaggaggctcgagaaggtggttaaccagggaggagtcagtgagtgcacttttgggcccgttgagttgggggcgtctgcaggacatccaggtggggaagtatgttttttcagctatgcattgttgtggggtttttttaggttttggttttgcttctccagtctacgaatagaacttgaatcctccttaaattcatgaacttgacagtaacaataatgtcagaattagtatgtctttactgcggccagagtagacaccctgtagcaagcgcctagaatatagaaagcaaatggtgtttttggcagtctgatacaggcacccagctgctgagtaggggcacaggcctggagagagggctctggagcagaggggtgctggggaagggtgcagaaaagggaggagaagaattatctctaagaagaaatcacttttgattttaattttacacacatggggctcataatactctcaagaacatgctcagcaatgaaggaagatagagagataagagcaagcctccctttatggtaggctgggggacactgttgctttctgcggagcagtctccagcgcccaaaaggaatgtgtttttggtgcaaggcaaggagaaagtgattctcaacccttgcatggctttcttcgtgccttcctaaatgtgcagtttacctctcagttctgatctgctccaagtgtagggataggattatggatccggagacattttaaatatccaaagagaatgttgctctctctcttgcattttattcttatttacttagctactgacttgcttttaaagcaatgtcaaagggaatctatatgttctgcagtgtatctgattctggagtctcacctcctttcttgtgttaatttaggaatgtttcatttctgcaaaactagtgctgcgatctttgcttttctatgcatgcctttcatctggtgctcacaatgtgctgtacagatgtttcactgccagaccctactgccccctaatttgctttgtgattcctggctagttacagtccctctaggcaataccacctctttacctataccaaagcacaaaaataaggcaccttttggggggtagggaaggggtctccctccatacactgtctcctacttctttgtccatcatcaaatccttctcatactctggcttccctgttcagtctgtgtgactcccattcatcaagtgataaattcaatcattaattcaatatgtccgtagtgagtgatatattatactaagaactgtgcctgttgtatccctagagatatagcaatgcacaaaacacagtcagttactgcgtctaagtgctcactaaatgtagtgggtgaaatgaatgaaaagtgagcacaaacttaacaatctgactcggtgtatggtaaaatcggaggactcaccaggtgctatgggaacatgaagtgtaggccacaaactcttcttaattaggcagagaatgcttcctgtaggatggaagagcttgctgtggtttggctcctgggtctgcagtttacaagctgtttgactttgggcaagtcactgtacacctctgtgcatttaaaatgtgataatgatgtaaaaacttagtacagcacctatcacatagtaaatactcatatacacatattcattcactccttctttcagtaaaaatcatctattgaatacctaccgtgtgtcaggcaatgccctggaaagtgtggatggtgcacccaggtcttgaaatactaatatttccaggaaataaactacatcatctcagttctttttttttttttttttcctgcatggactacacttggaagaagtctttgaagtaacaatagtagaagttcttttttgctgtctgttgaagcagcaactcagaggattttcctaggtgtgagggaaagcccgggcagtgaggaagtagcaagtgaagctgtgcccaagttgcacgtttagggttttcatctcaccagcagctccagcctacaggagtcacccctcccaacccccatccctgtctcaaattaaggtctgcttcacatagcagggcacaacaggaatgcattgtcgtcttctgttgctgtcacaagtggtctgaaaacctttaagctgtgcaatcccccactgctgctgaatacttgaagttcttctatgaaaccttagcatgaccccgcatctctggtgctgcttcatctcgcagaaacctgtgaaccatggaggagttcttctcatcccgtgatggacagaaggctgcttcttcagagagagaagtatgagcagtgggaagctaaggaagcttacactgttgttgatgatcaaaaaatgcagcaataagcactatccttctccaggcccagaaacagagctggggtctacaggccagttgaattaaaaaggggaagccccactgtttagagacattctctttctagcaaccctggccctttcttttttccttctttttttcttgagatatagtttaacataagattcaccatcttaaattatatcattcagtgctttttagtctatgcactatgttgtgtgaccatcaccactgtctaattccagagcatcccatcaccccaaagagaaatctggtacccattaacaatttctccccatccccccccccaccttcctccagcccccagcaaatactaatctactttttgtctctatggatttgcctattctgggtatttcataaaaatggaatcctgcagtatgtggccttttatgtctgacttctatcatttagcatgttttcaagattcatctgtaatgcagcatgtatcgatacttcatttctttttatggctgaataatattccattgcatgttccaccttttggctatcatgaataatgctgctgtgaacaatgatatgcaagtttctgtgtgcatgtatgttttcagttgtattaggtatatacataggagcaggattactgggtcacatggtaattctatatttaactttctgaggaactgccaaactgttttccacaatggccacgccatttatattcataccagcaatgtatgcatgtttcagttggtccacatccttgccaacacttgttattgtccttttcatttttagcatagacatcctggtgggtgtgaggtggtgcccttgcttctgtgcattgatttggccactttagcctttatctactacttctctctactcagggtagtctcctatcagaataagtttctctgatctgggatccagagtatttcctaaatggaaaggaagatatgaacagtttttaacatgttctgtcgtagttatgtcattcttactgttgacttgaccagagtctgcatcatcccaatcttgagctcccagttcggatgactctcactgctgtttgctaattataaggcctacctttggtaaggcagagatagctgttccctcttaaatcagccactcttcttgcccagacaactggagtggggaatggagaaactcattgctttctctcacagtctcttgcttctctttattgctaagccaaggggttaatgaaatatacaaagagctcttgtttgaaagaaattaaaatcagagcataatcacatcaaggcctgctactcaaaaattcgtgatcccttgaacatagctcatataaagtgttttcaaaagagagtttgataggcaagttatcaagttatacttaaccaacttaagggaacaaagtattttcatgcattttagttgggtgtttctattgcctttatacagtggggttaagacttataattattcttatcattgaaggaagtcctgaaggatctgcatcaaacagtgaaactaccaactcattatgtgtacttgtgggtaatctgtggatatgttgtaattcaaacttttctagcaaatttaaactataatgtgtctcaaccagcccaaattaatgaggctttggagtatgaccattgaatctaattactaacaagacctaaatgaagtgcaaagcaaaactgactttggctttgaattccaggtctgcgctggctgtatgacctcgggcaagtcattttttttctctagtataaaatgagattctgatatgtaggttacagggctgttttgagaagtaaatgagattacttatataaagtgtcagtacagagacagtcacataaataggaggcattcaataaaggaagccattagtagtagtacaaaagatgtctcattctataaataatggatgtatttcaaaaatgttgccagtaaacacccttttgttttatggataatgaaacattaactagattagggagctgatttttaaggaagccgatagtaagccctcttttgtaaatggacagatcgtttccagtttttcttgtttttatagctcatttttgaataacaggatttcttaaaatggaacacacctgttcagaatcccaagcccagcaccctcatctcttacctctacttaaaaaacagtttgattctcgggttggcaatgttggtgtaacaaacaaacaacaaaatgcccctttgatgtgactgtaatatataagggagctccaaggtctctgagtcaaaggagctagtggctcctgggagaacagggctgatttcactaatctcattcttcatcaggctttgaagggaaatctcacaaaaacatttaggttaaaatgaaagcaaaagtgctctcgctgtaataaggatctcaattataaccctaggagagcagaggggcaccggatttgatagaaagaacccttttagcacatccgtctttgataacatctaatgcaaagagtgaagcctttgaaattagttggtcagtccaaagcagtttttaaataatgcaactgaggactttttgttatatagaacagtccttactggtgctgactttgagggttgaattaatttttcatgagatcttggaactccaggctacctttccagcctcttctggtttctcaggacttttttctaatgtgtagggtgattaaagtgtttctgtatgaaggtattgaggggctctgtttgtcactgtctggaagtgtgattctggagagtctgagaattctccagtaggcccttatgaactggaccgttctacgatatccattcttcatcttccattttccttgcctatgccctgtgtacagcactatacatgcaatcatcaaaccaagaagacaggtgggagaagtatacttcactcttgcagagaagtgccttttttagaactgcaagatttaaatgagggaagagatcaatagcttattttttcctattcatttccaggaagggatcttggcaccctatacctatccacttgggttcctaagaggaactatctttcatgcgtctgattgctggaaatagggtcttgtctaacagaagtggaaagtactgacttcattgttagccttagagagtaaactcagctgctttattttctgaagcatctcccaaatattctaatctacccagattgcttctgttcttcaaactcctataatatatatttgtagcagaaaaaaagtagaaaatagctttaagcctgcctttctttcccaacatttcattataagaattgaagaatatctgacatttacttatataactgcattggggaaagaaggaaggacaggcactgtaggactaattattctatggaagctttagtgtaagtgctgagagcgctgtaaatgtaatggacaagaggaaaaactctgaatgccttctgaacagccctccctgctgtctccctctcaaatcaaatccatgatagatgccactctgctgtactcccatggtatccagtactcggctccatccggcactcatcatactctgttgtgattacctgtgtgcatgtttgtcacctccactagactgagatccacgagaacaaggactgtgtctcattcacatctttatccccagtgctcagcatacagcctatgtgctcggtatatgtttgtcgaataaatgattgagcaaatgagtgagagagccatgtgaagtagttggggccacgtctcaaaagaagtgttactgaagaaatattaggtgaatattccagatatcagaattgatttgaatgatattgtacttctgaaacctaccagagtttgggcatatgatactaggaatcatggaaacagtgacaaatgtggaatattcatccagtaaacaaattgtgggtagctgaacatttttgcaactctcttcatattgtattgacagtacacctatgaatcactcccttcttcagagtttatcagtctcacattaatgcatcaatcatcatttgcagaggtggggagtaggagaaatgagccagctctaagaaagattgccgctgtttatgggtagccaatcggcaatgggccgatgcctattggtaggattcttcaggtcataatgtacatgcacaagacctttttttcctttcgaaaagggataattgattgaggtgagaagattggagagtcctaggagatttttaatccagtgccatcacgcaaagcttactacatcggtaagacagttccataggggaatggaggagtaattgagatgccacaccagctggaatccagatgaagatacatttggaagcttaatcacaatcatgttctacactaaatattcatccgtctgtctcccaaagaggagaggaaattaagttgtcaagggcaggatggggatgagggtttagctgaaagaagaaacccacaccatatccttaatctctaaatatgcaagactgtcttaaatggttgaagcaagggctcttctttccagttttatttcctgagaaatatttgagctgtttatacacaattttgtcagctttacagttaccaaaatggactgttaagataacttagcctcctctctgtgggataaatacagatgagcaatgccatctcaaaggaaaaaatgctttattgagccaatatagaaaagtattaaagttgtgtaaacatgcaggaagaagcaagggaattcctaacagagctgacgggctgtgattgcacatgccttgatatactctgtcccaaaagttgaatgaaaccctggatgtggtcgataggaattagattacgtgttgtgagggctttttttatttccaagttaaactgtttatatctcatctaaatggtctcatggcatctaaattttatttcaaatcatgatttcaaaaatatttgttgctgctatatggttgctgctatacactaaatgatagggtcctttgaaattctgactcaacaatgtgaatcaaacattggcttttgttaaaagggatagtgaagttcagtattgtattgtgccctgaggcgcttgcattaggtagggtgcctttggctgcaagtaacagaacaatccctgtttgaattcgttttaataaggcattgtactgtatcacgtgataaggagtcgtttgataggggttgctccagctgtaagatgtcctgattacacgggacatcatgtcatatgtcaagtcagtgttgggactccatcctgatactttgattagtggtggtggaaggaaagggtatattgtttttctatttcaagacaaagaacttaactcctggccgggtgaagtggctcaagcctgtaatcccagcactttgggaggctgaggaaggtggatcacgaggtcaggagattgagaccatcccggctaacatggtgaaaccccgtctctactaaaaaatacaaaaaattagccagacgtggtggcaggcgcctatagtcctagctactcaggaggctgaggcaggagaatggcatgaacccgggaagtggagcttgcagtgagctgagatggcgccactgcactccagcctgggcgacagaacaagactgcatctcaaaaaaaaaaaaaaaaacacaaaaaaaaacttaactcttacggagcactgtttggttatgccgaagcctgaaagtagccttctctctctttaaatgcaaagcctgtaccccctcagggtaatgtacttcctctgtttctttgtggttatcttggtgtgctgcctttcccagtgtgcaacaccatcctcaaactgggtctacaatatggcacatgtatacatatgtaactaacctgcacgttgtgcacacataccctaaaacttaaagtataatcaaaaaaaaagatgactgagggatgtcctggccatcctatcccgatgtttcaatccccagcagaagaagggggtcatcttttctccatgcttttttcttaggagggagtaaacttttcctagaagttcatcagttggacttcttctcactcaaaacctacccaggccagccccttgtgattattttatggtggtctttgcttggaggtggaggtaggaacacagccattctctttgtactgtgtgtcatatgaacaaagcatagctccctgtgacaccactgaacaatgtggtgccatagaacgcaggctgtggagccggacagtcctgtacctgaatcccatctccatcactaaatagcagcgtgaccttggcaaatcgcgtagcctcagtgagcttcactgcctcttgggtaaatatgggtgtgaacaccagtcccacacagagcttggagaattacagcatggagcacaggagaagcactgctcagtcattcttcctcatccacctatacctttccatagagagcgtcatggtgccaactcgttacctaatgcacttttttaaaaacctaagtataggtcttccttttgtaaaccccatcttcttatttacacatatgttatggtataaagtataatttgattgaacgtatgtgcatataccagtatttggtgtgaatgtattccatatgtgtacattgtaatatgtgtatatatgttataattcatacacatattcaatcagcagttccatattgagaagatattctttgctccctattgtaccaggcattctagttgttctggtttaatgataatcaaatgaggtccacagacccgtgccagttagcaaactgtgtgttactggtctatgacaagaaatttacattaagcatttagacacatttatagtcatttgacactactaaggcatcctagtccatgttcatttttctaatcattttgattatacaaaagtattggcacatgagaggttggaaatttttaaaaaaaacgaaaaattctgtatcatttgagaagcttactaggatagacacatactgaagatactcttggccttccaggcactaaggtttatttggagtgaaaagagattgttatacaaagttgttaaacaatagtgtaaacacagtcgtgaaaaagaatatcatgaggcagctgtaaatggcccagtgcgccacatcagtggctgcggtaacacttgccacagatgtccggaggacgaggtcacagtgcggcagtctccttaagcaggtggacttgttttgatttcccctgcgtcccaggcctcccgtcagggcctactctgtcccctctcactcagcagcctggcgggttaatctcccggtgagcgagagcctgtgaatgaagctggatggagttatatgtcagactgcaacaggcatgcactaaacatctcgctccatcatccttgacgaggctttgatgttagcgtgaaacacgtccaattacacgagacatcatgtcatgtgtcaagtcagtgtcggggctccatcctgacactttaattagtggaggtggagggaaagggtgtattatttttctatttcaaggcaaagaacctgactcccactgagcactgtttggttatgcccaagcctgaaagtagctttctctccctttaaaaacagagcctgtgctgcttagggtaatggccattgtctccactaacgaataaagctatgggccagtaaacctagtctaccaggagctgctttgtgagctacccaagctgccaagtgttctcatcttcagcaacataaatgcttagtaattatggactttgtttcttgacattaaaaagtgactactaatgctcttgtgtatctcacaggagtattagttgttgaagttgaagtagtgcccctggcaatgccttagaggcacgaatgagactacatgaataggcacgatggaggtgggggctgagtggagagagagggtgcagttagggacctctgctcagaagagcccttggtcaattagcagtggtttgtcccacacctgaaaacatcttgttttgcttgtcccactatgagcaggtgttaagtgttgtggttcagggatatattccacctagaaaagtgtctaggcatgaacacagctctttgccatttgtgaagatggccctgggtaatgagaaaccagcgctttgctctctggtcccggaagaaggtcgtccaacttaataccgagtgaaatctctgaacgtcaataagctgcattcattttgacatctagactcctgtgtaattaagatctcaggtctggcgtttggtttatcgagcatgtgtcaattctcatttacataagactttggtttttcccacatctctgcacagacgccgccaaaaaaaaattactattaacaaggagagggctgaggatagagttacacagcccatcgtgtctctaatccctgcttaacatttcccttaaaaagaacattgccctattcggaaattaaatgctgtgcgtttagatgttctttatggagggagaggggaggtaggttttccactgctttatattgagcttgaaaaacatccgatttcatgccccttattcaactgtgaagcagaatttgatgcataattggagggtggtttctttatctcgctcttagaaaacaactggctgaagcttctctcacctccctgtagctggatgttaaaagctgaggctggcctcacagattccctaggtgtattcatctagttctgtttattcaaactgaagtctgctgggtgtaactggatcccacgaaggaggaaaggcacttcagggactgctggaaaccatccttccctctatttggagcttcctccaaggcaagggcgatgcggacccaacactttggatgcctcttcttctttccatgttaatggctacaaagcagatgggtttatttttgcaactcaaatgagaaaaaacatatttgaaagaagttagggcactttcacaggaccacacatggagttggttatatgacctgggaaataggacagtctttataagtcttcattttcacatcaataaaatgtgctcgtctgtaaaattagggatggggaaagaagtctaataaaaaggctcagagaaaggagatgctggagttgatgtaacaggattcaagactctacgatattaactgtttcaagtagaaaaccatcaagaaaggatagaaatttaggattgctttcaaggagcctctcattccagatttactacttagtactgtgtgaccttgggcaagtgactgtacctctctgggcctcagatgcctcatcttggaaatagattatcgtggtactcactttgtagtcttgttgtgaagagtaaatgaggtaattcttttttttttttttttttttccagatgcagtctcactgtcacccaggctggagtgcagtggtgcgatcttggctcactgcaagctccacctcctgggttcatgccattctcctgcctcagcctcccgagcagctgggactacaggtgcccgccaccacgcctggctaattttttgtgtttttagtagagacgtggtttcaccgtgtgagccaggatggtctcgatctcctgacctcatgatccacctgcctcggcctcccaaagttttgggattacaggcgtgagccactgtgcctggcctaaatgaagtaattcttataaagcacttggaagaatactgacataaagttggccttcaatgttgccatcagtagtagcagtattactcttactactactgttaatattattgatcaagatgaccctctcctctggataacataacagtgattgtctccactatggccaggttcttctcttacagtctatccacaatatttgtctaatcctagaagttctagaaggcatccaagaatctaagttagtggttctaagtctcagttcacataaaaattatcttaaggatgctgggcactagtggctcacacctgtaatcccagcactttgggaggccaaggtgggcagatcgcttgagctcaggagttcaagaccagcctgggcaacatgacaaaaccccgtctctaccaaaacacacacacacacacacacacacacacacacacacacacacacactagctgggcgtggtggcttgtacctgcagtcccagctacttaaggggctgaggtgggaggatctcctgagcatggagaggtcaaggctgcagtaagcagtgattgcaagccactgcactccagtctgggtgacagagcaagactctgtctcaaaaaaaaaaaaaaatcataggaaatgtttaaaaatcctgaggcttgggtcccatgaactgagatttttatttatttgatctagcgtctagctgggccttatgacttttagaaacactccaggtgattccaaggcaccacttggccagtggaaggccatgttaattttatattgaaaaagacctagaatataaatggtttactagtcaactaattttccacaagggcaccaagaggacacaatgggaaaaggatagtctgttcaataaatggtgctgagaaaactgaatttccacatgtaaaagaacgaaattggacccttaacttataccactcacaaaaaatagactcaaaatggataaaagacctacatgtaagatctgaaaccataaaactcctagaagagaacacggggaaaaagctcctggacaattgattggccttgacaggttttttttggatattgcaccaaaggctcaggacacaaaagcaaaagcaaataaatgagagcacatcaaactaaaaagtgtctgcatagcaaaggaaataatcaacaaaatgaaacagcttatgggttgggaaaaaaatatttacaagccatatatatggtaaagggttaatatcccaaattcataaagaactcatacaaaaggctgggtgtggtggctcacgcctgtaatcccagcactttgggaggctgaggcaggtggatcacaaggtcaagagatcaagaccatcctggccaacatggtgaaaacccgtctctactaaaaatacaaaaaattagccgggcgtggtggtggacacctgtagtcccagctactcgggaggctgaggcaggagaatcacttgaacccgggaggtggaggttgcagtgagccgagattgtgccactgcactccagcctggtgacagagtgagactccatctcaaaaaaaaaaaaaaaaaaaaatcatacaatagtggaaaaaccacataacccaatttaaaaatgggcaaaagacctgaataggcatttctacagagaatatgcaaaaatggcccacaggtatatgaaaaggtgctcaacatcattcatcattaattaattattaatcaaaaccagatgagataccaccttacacccatttggatggcaactatcaagtcacaagataacaaatgttggtgagggtatgaagaaaagagaacccttgtacattgttgctgggaatgtagattggtccagctgttatgtaaaatagtatggatattcctaaggaaattaaaaataaaattaccagatgacctaacaatctctcttctgggcacatacccaaaggaaatgaaatcaccgcctcataaagagacctgcatgcctgtgttcactgcagcgttgtgacagtgaacataggcaacaacctaagtgtccggtgacagacaaatgaatacactgtggtatatgtctagattggaatattattcagccctaaaaaagatcttgcctttgccacaacatagacgagcctggagtgcactgtgttaagtgaaataaaccagacaaagaaagaaaaagattgcattgtttcaagtatatgtggaatctaaaaacaaacaaacaaacaaaaacccaactgtacagaaatagagaacaaaacagtgattaccaggcaggggatagctagggaggagatgggagatggaggtctgtattaagtagggagggtggccaggtctggagacctaatgtacaaccggaagactatgggtaagaaaactgtgctatatttgggattcatgctacaggagtagatttcagctgctcttgccaccaaaaaaaaaaaaaaaaaaaaaaaaaaaatcaaggaaaaatggatacttatgagatgatggctatgttaatttgcttcactgtggtatcttttttactatgtgtttgtatcccatatcatgttgttccttcaatatacacaataaaattcattttacaaaatgagtagaataagcttttgtttcccaagcatagtattcatgagtgttatatgaggtcctgttagatagtttagattatatgttaacagtcctccaactattttcatgtgaattaggacaaaaaaaaaaataactagcagatcgactccatgacttcacatgtagtattctttacactgaaaaaaaaaaaaacgaaactaaaacatggaggggaatctatataagttcaacttaagtaaaacatcaagttactatttacacatatatggtaaaaaaaaaaaatgactggcacataagtgagtaaggcttagaagacatggtatgaactaaatatgactatttttataattctgagcaaatgtgattgttctaaagattaaagtgatttttattcatcaattgtaaagtttctagcataaaaaaggtagatttatgaaatacaaatccaaacttctaacctaaggacacaaaagtcttggtttccagtaacttattttcaggacacagagataaaaaaaatgttctttcatatttactcagagctgtaattataattactttgtatatatggacatggttaatgataatgacatcctgtattttcatagtaccttcccatttacagtcgactttcactgacatgaattaggcatcctaataacccgctgagtttggattattagccccttgtcacaaatggggaaaatgagggccagaggggttggttatgtggcctgtcctacgttacacatccaggacatggaggtgcaggattggaaccacatcacctaatccaaagtagtgctttttattttctaccatgcttactcttctaagtcttgtccatgctgtctgctctctcttccacattcaattaaaaaatccctcaagggcacctctaactgtgtaacaaaggaaaaccacctaatcatctcctcccagctcttttgtttatgcttttgaccaactccaatttgttctccagacaatagccgaagtcatcatgatagtcaatcaatcatgatacctcttacttaagtccctgcaatgactacccaacttgctgtgtatgaattcgatgccctgctcctcctgaccccgtctcccatctcctactactctgttcttgctcactgggccccagccagctgtgtctcctctggatttctcaaccaggacaaacacttgctgcatcatgccagacggtgctgttccatgcagcaggtgtgccctcccaagaaaatctagcttcggtgtaacctccatgaactgtaattccctgacctcctgtttgggtgagaccccactccttgctctttcatgcaacaaacagatctttcctgcatagcttttattacgatttggaattatttattggtaagattatctgtttcagatctatcagaaggcatcttctatgagggtagaggtgaaatcacctccatattttttttctacccctctagtcccagacgcaaacacagtacttagcacatagtaactcaacaaatatttgttgaattaatgaacagaatatgaaatggctgaggggtaactttcctactctgaggacaaagtgcagttttcactgcctacactgatcacaagccagggagtctgaaatgcttgcaaaaacttcaaggcttcccagggccatctgcaaggatattatcctgaagccactgcttacacctgactagtacgactactatgctggatactcaagacaggaaatgaggacctgtcaggggcttctaagttgctattcaggagaggaaagcttttagttaaaccagtggtagaataccctgagccctgtctgcctcgcctttccaagaagaagcatgcaagagcccgagggtcacaattttaaaaccacatatctaatagataaatacagaaccagaaattagaaagccgtattctattcccaaccataccacgttctacttccgagccaataagttgcttttattggccaaacttcagttttcttaccattaaatagatgtaatattgtttatcctccttaactcatatgattgttttgtggataaaataagacaaagatgaaaatattttgaataggtagaagtactttacagtattatttgagcctgagttacacagatagggtttcttctccttagaggcttcaaaattaaggaagatgcactgatttccatagatacaaaaacattccaaagacataaacacagtgaaaggacaaatgcattattcattggcattatggatttaggtgggtggtcagaaagaaacagtgttctataatagatctccgcctgcggatcaggagtcctgggtttgaacctaccttgtcatccatttactagctgtgccagtttggtaggtcacaaaatctctgaaagcctcagtggcccccatctgtaaattgaagagggagggtgagagtgggtgggaagtggagaaatagtaatgatattatgatagtttggaggatcaaatgaaaagtggactaggaaaggcctttggaaacagtgaagtgacttagcaatgcaaggcattagtattatccaagcatttgtgtgtttagccaaggggcagtcagaaagtcgtcagggaaggctgcccagaatagcaaagaagtatcaagaatgacttaaataatagcagggagagggcaggtctagtcaaagaacaagtttcaggggagggtgcagcctaggagagggcaggtttccaaggggctggcaggacccagccaaggtggtgggtagctcccctctttccaaaagctgaagtggttcctaaaagccctggattacaaggcagaggacagcattcaggtggggagaatgtgttaaaaggatctcaagtacactcaaggatgtttgtttttgattagaagatgaggattaactggattaatggagcctcatgaatggagaatgtgcagatgctaattgcccctaaattacagtggattccattggaattgtgtattcctctccacaaacccaaccactgcctgcctgctctctccttccctccctccccacacaatgctaaaatgaatgtgtcattgtaactgagatgaaaggccttgaaattgattttctacttccttccaagatctcttgtttgcaaaacacaggaagatgtaagttactaatcgagttccagtttatttcaaacaaacaaacaaaaaatgtattctagggattcagttgctggaaggctttttcaagccctcatttcttgcttagtttctctgccacaccaattaacttagtggttctcaaagttgagtgcacaccagaattacctggaaaccctgttaaaacagattgctgggccccaccccacagtctctgatgcagtaggtccgaggagaggacccaaaatttgcatttctaacaagttcccccaatgacagctatagtgctggcccagggccaccctttgagaacaaatgaactaggaaaatatcagagtattttaaggaatctggctaacaaaaagagtgcaaacctcaaagtcctgtggctatgtcttctcggagaaagtggtgcaatcactcagaattcaacaaatacctactgtttcctaagtcagctatgcatagattctcttggatttggtgaagcttacggatagcttatgggatcaacttgctttgctattgcatgggaaatgcagaagaatttgcaactggggtgttttcttcctggagtccccacccattcctcctcctatctggtttgcacaccccctcttctgttgattatacatgtcaagtggtgttttcacagctccacagccatcacacacctccagacccctgaacactccctttgccttgaagccaccaatatatgtccaggcctattctacatttatttataggtcacttttgtgcaaggcctgggctgcttttgctagtgttgccaaaattttggaaagcagtggaatcaacacattttgggttctagctctcaccttgcctctaggttaccatgtgattgtcgaaaaaatacttaaacctctgggtaggattttactcatcaattaaagaagttattagtctagctagcttagtggttcttctccttttgggggaaatgaaaatgaaatgtatggacctcttcctaggaaagtggacatgtgcaaataaatgcaaaatattgctcacaattgttagactgcctgaataataatatagtaataacaagcaatgatgattatagcatttattaagtgccaactatgtgccaggcactgtacaaggcactttacatgtgttatatttaatccttgcaagaatcctaggaggtcacaatgcccagtttctagatgagaaaaccgtggcaaagacaagagaattcatctcagttcacccagctggtaagcgcacaatgggatttgtgggagcctacacagccctgaagctgaccaatggtcctctgggacatgtatgaccctgagttaagagtagacgcagttctaggtgatagttcaagtccccctgagctctgaagtacataattcacagattttttttttttcccatcactaataaccaaacatttggagaaataacccctggcattcttaaggcttctgtgcatcagaggtggtcacaaggtttacaatttaaagaatatttggggattaaactcagaaaaccaagccaccacagtgccacacttctgtcttttgtgggtgtcttaaaaatgaatgctttcttatcgtagtttctgaccagaggcagcttcctttaaaggctaaaggaagcagcccgtctcagctccagcaggtcagtaatgtgacgagataaagggcagttccttaatgaaaaccactctccctcctgccagtaaaggagttttcttagtgcatttcaagtcctctaacacctcttcccagatcaatggcttttcataaatgcaccaggagatctttgaaccactaatgcttcaggggctgtttaggtttggagtcaaactgtttaatataactctcctccaagtctggctctattgaaaggtctcaggaaacaaggcaggaggaatgtataaaaagcagaaccgctgcggccaagtgacgtccctcgcctgcctcggccttctgtttatacaagcaaattggaccaggcttattacattcaggagggggaaggaggaataaagtggcatatgggtcacggcggagagttgagtgaaaaggaatcagattaaaggtgccttttgattggagtggagcaagtcatttgcttaggaagcggggaaagccattgattgacttcatcaacagattaagcactacaataaaaactgcattgtgctggagaagtgtgggccagacttctgcatgttcctgggaaaatgagtgccatttaatttaaatacttgtttaaacacttacgctagaggaagtgtcttttcaaaagggacatgactatgagcatcaagaaatattataacaaaggctagtcttttctatctaaagctgttcccacacttgctttctccaagcccttggtaggaatgataaaataatcagaaaggtgggcatttcctaaatgtagcctgtgcagcactgtgctatgtgctttacctcatctactgttactaactctactttcagatgggaaaactgaaccccagggcacatgagcaacttgagcaatattataccaatctgggatgggcacctcaattttcttttactcaaccaccatcctaagtctgtctacccatggaaacatgatccactgtcatctaatgtttcattcttttactcctaaagatctatgacttactggtaaatttcatgttgttccacacaatatcccctcattcagacttcaagcctcctgagggcagggaccatgtagttttaaaattttgccttccaccacagtgcctggtacagtagagacctggtccctatcctttattcttgaaaagtcaatctaaaagtagctctagagttttggggtgggttttttttttctgatgatagtattcatagaagctcactgcataaaatattgttttaggcgctaaaattatataaaaattaaaaaagccagcagaggtaacagtcattaacatttcagtatatagccttctactcttttccttatatacatacacatgtaaagatatattttaaataggattatgctatgcatgttgttttgtaggctgattttttttgctaacaatacatcatgggcatctttccatatcaataactctagatcttcagcagtctgtatatcataatcctgcacggtgttccattgtgtggttgtgtcatgattcacttagttcacaatgaatggacttgggtggtccctgatatttgcttgtctctgcaaagatggagcagacattcctgaacttacaaattgatgctcctctttcagtccttgttcttgacccaacttcttgaaagcttcacacccaccacatttgcttggattgcagttctcctagaaatggcaaaacaacatactttgtctatttcaggaagccttcttacaatttcatttttaatattaaaattaggctgtggcatttcccttcgaacagaaggaagtcacaggtgcccatttctgatgcagttctcagaatatcctaatctcctctcctgctgaacagtctctgccagggagtcaccacacccaggagcttaagagtcattttcataaattccccatctatgaaattgctgtggacagttaataaacccagagtcaaaggctaatggatgccagcaagagcatggggagaggagacaggctggtgattgggggatttgggaaattagccactcaccttttaagcatcctgggaaatcgcaggtggctatagctatgctagggccaagccaggtataaaggcggaactaggggagagttcaggctggtagtaacagataatacaaagtgcaggccctgggagccttatttattattttccatcagccaagtgaaggcaatttttagatttagacttttttttgatgaactatcaccatggtgatggaattggaaattcttttcctgacaacattgctgttaaaccatttgtttaattatttgcataccatgactctaggaggcccctagagctgtatgcttctctctgtacaaaagagagttaatctcaggcatctcttagtttccttacagcacagagatccaagttttctatatgcctcgtctttaccaggtatggattgaggctcctgggggttccacagaattcatcttgcaaaagatgttcatgaaagaacaagattgaagaaaagaaagaagagcaaggaatgtaccatctgttctgggaaaaatggttttgagcctctctacttcttctctggacccaacagatttggtttctggcacatcacatctacagaatcacctataggccagagatgttggaaggagactttcagtaagtaccttctggtacgagctgggaactctggagtctaagttaccttttctattatggggctggagccatttctgaattcatccctttccttccttgaataatagtgtctttaaaattccagatggattcaagatatatttatgtattttaatcccctctcttaactctgcagctgactccagaaccatatccagaaaggtctcttctaaacatccctccctgatttgggtcgtgcttattagcgaaagagaatgagcttgcttcctgagtcttcctatactttgccctgacccacacttccattcagacctggtctctgaaaaattactagccccaattataatgaacagtttccccatgagaagtaatttaattttgcaaattgttgtccaagtcataagggttggaggtgtctggagactttgggagcggcagttgttctctaatcctgtggccctgtggggatactgtgtacatcagggtaggaatttcttcaagctgaaccaatgtctcctctttctgcctttttccttattttgtctctttcttgcatcactgctattcttccttaaagacaggcaaggggttggtggattccaggctgttaccaccccgcttctggaggatgtggtgcgtgtgacagcttgggcaaggcacagagcccaggctgtgtgtgtcacactccgttcccaccgacaaacactgctgctcgcctccctgtccaaatctgataccacgtatgttctcccgatcctgtgctgttgctctggaaaccaaggaagcagcaggatctggagtaggttcatggccgagtcaaccttaaaagtctcccagacgtttcagcaacttccggcaggaaaaatgtacctgcaccccctgcccagtgagaagtttttgactgatagctctctcccccgtggaaaagtttgcctcctgaagttagagaatgtctgtcttcccacggctcatgttgtgggcagggtagtatattggatgaagattcaaacttcaggatctcaggcaaattccagccctgctgcctaccaggtcatgcacataacaaataaataagaacgtcatcttatccccttcaaatgccactctgcttcctcccggggtggactggccatcttgcagtctccacattgctgagttccggtactgtgttcacgctcaataatctgctcttgggattaagttcctggctcagaggcttagcagctgggtgactggcatgttcttcacctttctggtccatctactggttattcaccaaaagggagtaattatgcctacctcgaagctatgttttgagaaagagaattgcatacatgaggtccataggtcaggacacagccccaatatgaccagctggcagaatcacattctccaattgtagcatgcgaatgtttccactgggaagaaaaaaatttctttcccttttcccagcctcagtctttcattcctttcgaaagatgcatctgacttcataataccagctcacctctgtctttagagataggtaaaacagagttataaaactcaacccctgaccctgtgccccactcccacccacacacagccatcccagcattattacctttgctggcaccagacaggtaagcccttcaatatggtggaatgtaggtgggggagcctaggagtttagggcaaagaagatgggttgaagataacagaagagtgagagcaggtagctgtggtgggaaaaaaaaaagaacagagggtagaaatacaagaggaatgaggaagagagcaagcaaggagaatgaccctatgaagtcagcagcctcctaggtccacagaagtctggggagagtttactgtaggcctcttctcaatgcacatatcctacaacccagaggcctagagctgtttcgaaaacagatgacagagctttagtcttacaattatccttttaatgaaaattccacccctcttttttctttgaatacagtcctaaaaaaatttctacacacagacaaaatagctatttttcaagtaacagaggaaaacaaaccccaaacccacccatacaaccatgctcactcctctgcatagcagcactaggtcctcacagaggagctcataccaaagcctgagtgttcaggatcttcagtgtgttggcattgtacctagttatatgcatgtacacactcatgcaattcctaaaaaagacatccaaaatgatgaaaatatggctggtgtaataataacctgattaagaaagatagcatgcttggataagggaagttagagcttccgtttcctcaggcaacatcatatacacagaacacatcatgttagagtgggtggcactagaagtacaaacaatactggactcttagtgaaatggtgatatattttttttcttattacctgttcaccttttgcccattttcttgtggaacaaagcagggctgtaagctggggtgggtgtgtcctttttgggtgtacttaacatgtttgagcttagagcgctcactctcttgtttcttggcttggcttttgctcccctcgggaggatgtcagggcacacactggacaatgccaccacttgttctcacgcagagtttcatctaaaaccatgaggggcctgaaacttcttcctgcctttgcttgttaccccccgcaaaaaccatcacatttagtaagatgcttttaggtgtgagaaacacacatctctggctcaacctttcttgagttttcagtctcattgtttttagctacaggatcatttttgtacaaggcaaacataggaaatacatagtgggtgaaaactcagtctacaagtgtctgtatccaagaaaggtgacttttattgtttgtaacagtttctcactgatgttcacttttccctgttcacaaaaactaaatagcaggcacttgcaaataatccctctgcctcctttccaggactgtgtccaagtttcagagagtatagcggtgcccagcctaagggaggaggtagtgggcatctagttcatggaacctaagtctgtccaccttggtgtccaatgaaataaccctttctcactcaatatgcttcttccctacaattctcgagggcacaaaaaatcatccttttacttactgccttgctcctcagcggctctgggagactctcgaaggctgtctttcaggcgatgccgctcattgccatcatgaagccattcctccttgaatgctcctgcagtggcatggaggcaagggaattctcagaggcttgccccctgatgttttccccagctggaggaatctttggtggagggagactcctaattctgactgatcaagtatactctgagcacacttagggtttagatctacaatatccaatagaactttctgtgatgatgggtgtgttctatatgtgtacttccattacagtagccacagtcacacgtgtctagtatgaccaatgaactgaatgtttcattttaattgacctcaaatagctccatgtggatagaggctgccatggtgagcaacgcaggtctagaattttgaaactgagagacgaagaattaatgtctttattctctatgctatcctgggacaattggtccttaaggcaaaggtgaattatatctggtctgcctagatacaagggagtatgagtgtcttggaaggggcagcaacacataggttactattttaaaatactatcttggctgggcacggtagctcatgcctgtaatcccagcacactgggaggccgaggcaggtcgatcaccagaggtcaggagttcgagaccagcctggccaacatggtgaaaccccgtctctactaaaaatacaaaaattagccaggcatggtggctggtgcctgtaatcccagcaactctggaggctgaggcaggagaatcacttgaactggggaggaggaggttgcagtgagccgagatcatatcactgcactccagcctgggtgacagagcaagagactccatctcaaaaaaaaagaaaaaagaatactatctcaccataaatacataaaaattcatgttgctcaagttgaatttgtgggcagcccagaacctgccccttgcccatcccttaagatactgaggcacctctgacagatcacaggcattcttggaagctgctttggaaacctctgagctagttatagctaaaatccagtctggtgctgacattccagggtgtagacatctatatatctatagacagaagaactacatcttctagatgaggaagtcctggcttccaaggtgtagtgacttgccttaagcacatagctcatttctagaaggttctgaaagccaggtctgtcacactctattcagaacactttcctccctacttcatagtcttctataggactctaaccctgacacttcactgttccgtctcccctggaaataatgatttcctggaggaagggttatcttgctctagcactgtgtgtggcagggcatctactggtcagtgatggggaagacaaattcattatgtgggtattttagaaagtgagcagagacttcaggcaaaagtagtttccgcgaccactgtcctctctggttctgcgtgtttctctttcccctttacataggtagcaatccctttacccaccatccatgcttttgcagatggtaaatgtgttctgaatgagaagatttcattccttaactctaagttctaacctaaggaaggaggctctgtgtttaagttaaattaattcagctgctgtaacaaatgaatttaatacaatgtataatgactcaaattgattgaggtttatttctctctcagataaagaccaaaatggcttttcttaatgagtaggtggcttccttccaagtaatgattaagagacccagattcccaaactcctttactcaattcatgattaagagtaatcattaagaactctgccactttcagcagtaggttcaatgctaggtttgtcaacatcgtgggggatcaaactcagggaagtttcacggaccaagccaggccaatttcctctccttgaatggaactcagtcacatgatcaggaccaactgcaaaggagactgggagatgtagtcctagttatgtagccaggaagacaaggaaatatgtttgttcaactgccagccagtctcactacccttctaaaccaacatttggcaaactttctgtaaaaggccagatagtaaaatattttaggctttgtaggtcatactgtttctctcttaaccactcacctctgccatgatactatgaaagtaaccacagacgatatgtaaaaaaactaaatggcaggacttccgataaaactttattacaaaaacaggcagcggccaaatttgtcctgagaaatggcctttatttgtcagtctctgttgtagcccagggaaaacacttattcccaagcaaaacacagaacaaagagcattttaaactatctgcaaagaactgaaaaagttatgtctgttttcactgctggaggcagtgaaagaaaatggattaagaggacataaaaagactcaaacatatttaatcctttataaaagagaaatgttttctgctgtgctttgaaggaaaagagtgatagctataggaagaggacatttatttaaaatgtaaatttcaggattccacccttagtattttggagttggggcccaggagtctgcattttccatatgctcccctgctcattttaagcaagtggtagaggtagcaggtgatcataatttgctaattgctgccaagccatcagtttttctgacatttgtggatgtaactacttatgagcctatggaatatgtgagaaataagataccgtgcatatgcaaagccgctgacctaggtaagcctaactcttcttttaccttcaaggaagctatcaaaatacaagggaatgtgagtgatcatacaagtctccctaatttattcttttaatgaattaacttgggactctaacttataactagcaacttgtgctgtggtgcaacccacaatttaacgcaaagcaaagggcagagagtcaagacttcaaactaggctgtgacccggaaggcagtttggcttctttcaggcattccatcacttgcttcccgcctctgcaaaggtcgacccccaggtctgagaagggacagtgtttgcactggcaagagagatctgcagtcttgtggaatgagttgacccagctggaagatcccaattctgagtgccatgtcacttcctttctccttcccaggatgcagctaaaagttctccctttgctgtctatgaaagatgtagccctgtacaaggcttccttcctgttgcccagcaacccagagtgggggaggcaaattggcctggagactcggggcgtgactagttgtcaatgcagggtgctaatgggcacctcagcagagagaggcaaaactgcattccgagtgaccttgagacagccactgcaggagttcctagggaaaggagtcccagacagccgtcagcgtgttcccgttccaaagatgtagtcaaaacagaaggaaaaggaaaactgccatcagaccccctgcatttccctagaaatagccagtcatctaccagagttgtcggagatattttaaattcccttcgcaagaagactgcaaagcattgaagagtgaagagcaaatcaatacagtgtttccacagttcaccacccaactcggagataagacagagaaaaaaattacccaaagatttctttttctggtagacgataggactcttgcgctcacgcctgatttctcggcatggaaatgtgcccttagctgtgaacagatcttcatgtttcttgagtccccatgtctctgggaccatgtccagcatcctcctctcacctgtctgtctatgaaaatgggctgctaaaccctctttgactcagcagtctggcagtgtcctgggctcaggttgatactctggcaactgagcagctcacctccctgcaaaaaagaaggctttatttttattttactgcccttttcagatgggtttggtaaaatgtatgaattcagaaaattcaagctggaaggggcttgcgccggctttggttcactcccctaatgcagacaagggactgcttctcgatgacttcagtgtagataggaatcaccccaggagcttgcaaaaaatgtgggtttgggggcatccccgtcccagggatctgcctcagttttctggggtggggcctgagaacttgtatttaacataaactcttcaggtgattctgacgcagacagtatgaatgttgcaggtaactctggaactagtataaataggatacatgcaggcttctggggggtgggtggaagatttgttttgtgtcagaattccttcttggagatgtatgggtagaaccataacctcgtcagcaagagaatctagcaatcttaccagcctgtgtttctttgtcctgctggaattttcctcctgcttaagcccatttttcctgtctttgactcttagtggctccagattacttctctgactcctccttatgaaagctaataaaccaaagaagacttaggagatgcttggacacactaagctgttccttaagcttttttttctcatagacaatatttattgacaagcttcttccttggactgcttatttacaccccttttgacacctctttagaattactgctgcagcatgcaccttcaaggtcatccattgctgcaggagatttagcccattgccatgcagaggcttgtgggaagcatcagttgactcaaaggagctggctgcaatttgtcctgctcctttcagccctgctgccagcgaggccttgcctaagtgttatgaatgttcctcaggctgccaaggtggctgctttcctttccttaagagcttcctttggtgagagcagctagcatttccaagtcttgtatctttctagccccatttcatgccatgctctttttagctctttcgttaacatttccgtattagggaccttcagtgcctgatgtgagctgggcattgggaaggagtcgaaggggatgtcccaggagagtccagagtggggataggtggggaagtcaactatctggaatcacagatgataacatgcgaagcagcctgatctccctatctcaaagtaaaggccatagatgtctaacttaaaggtctgtctatgccacgaatttgcctgacctctttccagggcaaagtgattttaactgaagatccataatgacttttaaaggcggactacaggacaagtcacacaaagtgctgagttacttgaggatttaaagcagttgctttcaagaatactagagttctgcagtaataattcacttcacaaggaacagcacagtatggagcttagagacggagctggattcaagagtgggattcaaaccccactcttgctctgtgacctgggatcagtctgttgctcagtctaatgctctctgttcctccctcaagtagcaatatgtgtaaaaatgatacaaactccaaaaaataacatttatagagcatttactatgttcctaatgttgtattaagtgctttacataattttttaattgaaaaatcacaccaagcctttgaggtctatactattatttgtcccatttcatagatgaaaaagctgaggtgccaagggcagaatctctgagagtattaacatgcctttaacactgtgctgtcgttgatctgtatgttattgtgaggattaaatgagatacatatatgaggagctcagcacagctcatagcatacagtgctcagtaaataagaattacatgtattatatgtttttaatggatggatatgtcccaaatggagtgacttctcaataggaatagatacacttaataatgataatatcatttattagtttttataaacttgcatattatatccccattcctaggaaggctttctggttcataaaaatcactccgccagtaatcagcatgataccttagttgctggtcatttcacccgttagctgtgtcttgatttctacagcagaagtgttgcatttctgtgagcacatgtgcttctgtattagaccaagtgtcttggtgcaggggctgtatttattgctctgtagccccgggacttaaccaggagacctttgcttgcagactgcctggcttttcttactcagcactcaacaggagacttggggatttatctcacagcctgagaagcacgtgggaaaaatagctactcaaaactttgtgaagaaaattcctaatttgctggcttccctggtctgcggctggggctcactggcctttgtgaggcagacgaaggagatttgacaaagagaggaaagaagaaaggcagagatgggacaggaagagcaagggggcagacagaaagttgtgtgtgtgtgtgtgtgtgtgtgtgtgtgtgtgtgtgtgtgtgtgtgtgtgtgtttatatttttctgagtcagaatctcattctatcagccaggctggagtgcagtggcatgatcatagctcactacagcctcaaacaatcctcccacctcagcctcccaagtagctgggactataggcaagtaccaccacacctggctaatttttggtttttgtttttgctgtgttttgtttttgtacagacagggtctcactatgttgcccaggctggtcttgtattctcttgcctcagcctcccaaagcactgagattataagcatgaatcaccacacctggccagagtaatgttttccataagattataaaagtttgaaaccggggagatccttagagagtatctattccaaagtcttaattttatcaataaggttagaaagttccagagaagttaattgtgcaaagttacacagctatggattatgtatcacttttggacagttgcagcggacactgctccagcctgtccatgcttgcacaaatgcatgcatattggtcaactctggcttttggaacatcattgctgagtggctcctggaactgtccctaaacagagttccccacagtcattaacacacacctgcaggagcttccctgccagatccagggtcagcagaaagcaggccctcaacctgctcttgcaggaggaccctttacctcctgagcataaaatcagccctgtaggggaggggtgtgagggagggatgattatgatgacaaggggatgtcccagagccactcttgttttgtcctttcctaatacacagaaaaaccaggctgagccaaatatatcaactcatagatggtgttgctttgttttttttttgtccagttagttggtttgtaattcattttatatggatggatagcccttatcaatgacaaggttttgctttttgccctcctgcaagtttggttctgtaatctacaaggtcattattgccaccttctgaggttgcatttttatttttatttttttgagatggagtctcgctctgtcacccaggctggaatgcagtggcatgatatcagctcactgcaacctctgcctcccgagttcaagtaattctcctgtctcagcctcctgagtagctgagactacaggcatgtgccaccacgcctaactaatttttgtatttttagtagagacagggtttcaccatattggtcaggctggtctcaaactcctgacctcagatgatccacctgccttggcctcccaaagtgctgggattaaaagaatgaaccactgcaccagcatgaggttgcttcttaatgctcctacactcagggctagctcaccttctctgccctattttccttccttctcttcattcctgtgtgcaaaaggcactgttttccagctcagaggagcgaaggaaagtgtgtgtgtctgtgtggaggaagccggcttgacgttggtcttgacctgtctaagtctatcctaggcttcagccaaagaaaagccctggctgtggctattctttctcttctccacctcaccatcctctcccccaccagtacttcaggtttcctggctctcatcaaatttgtactgactttccactccatggacttaggtattcaggacctggccaattttggttcagaaaattttctggatatatatagctggagagagagaataagaatacatgtataatgtataaaggcaggtgatactaccagataaaattatcttcttgagtgattcagtccctttgtatcatgccacaaagattatgttcactccatgagtgtgtcataaagctttgagatatcaagagtgaaaacataaccaacctgcctgcctgcctgcctgcctgcctgccttccttcccacaaaacattctgtattgtgcaagcttctctgtaataccaggcaggcagacctcaaagtttttgcgaggcattttatgacttttatccttctccctcatccactcagtgcaataactatcacacacaggaactatagcatgaacaagacaggcagtctctcttctcagggaaccaacagcctagaggcctgcaagccagagcaagtatgcagatctataaaccaggcactttagagtaagtggcatgagaaaatacgacaatgtgaggaagaaggaagaggtaagtaactgtaggtttggagggcaggtgaatgaatatttgagcagagacctgaaggagtaggagccaggcctgctcaaaatacatttgtctttcgaggagctgcatggggccccggctgccctgggccacctatttagcccgggtttaattccacatgagccttcatctcagaacgggcgtaagaggcagaggtcaagcagctgctgaaagtggagtaacccaatcttgggcacaagttggcctttaataagcatccaggtagccctttgaaaaacgaaacctgtggtcaggtctctgagagcagaaggatcgggtttcagttttaattacaaaaccaaagagctgtcccattttgctccatttcggcttcccccagaagaggttttcctgtctcccatcctgggggccctgacgtgcttacctgacacagagatgggctgctctaggtgcagcacacggagcttgagttggccaggcttgcgaaatggtaggatggaagcagaggccccagatgggatgtgagagcgggtgatgaaaagcatgtgggaggtgaggactgggtttgggggttgttggagttcacatttgtgggctatggctcagattatgacatcacagaaggatgggacaactttgaagcccaggagaatgtgcgtgtcttttcttctcccttgtcccctgcacctggcagaacctctgctcaatggaagataaagcgataagatggggatgtggccagtgctagtaaaagaccccttttaatcgctcacatttttggcacttgctatgtgctagacactggattaagcagctaacctgcattattttgcttaactcggtcagtgtttcatacagcagatagtagcgctattctcatttgatagacgcagaaagtgagcctcagagaggttagataagtggcccaggctcctccgtgagtaggtaatggccggggttcatcccaggtctgactgaagagtccatattctttacatctttgcctcactgcctcttcatgtaagctctggacctgccatcataagacaaatgggaagaggtgtcctaccttcctaaaggcattttccaaagtgatttctgaagatatctgatatgggcaactttccagaattagttcagttgttaaaggtttcacggatgaataaatggtgtgggggatgggggttgagaagaggtcagaaggagagacagcgtggagaatgatttccaaggctggatcttttctttatttgattctagtaaattttaacgaggcccttaataaaatcccagtgcttagcagagcctccacatttacaagttgccagacctggggcggaagaagggaagttggaatcctggcgctcagcttagtcctgctgacctttcacagttcaggcgagccaggcttgtaagattgagcactgcactctgagcagagcactcctgcccagatcaagtggccagaatcctcaccccaacacaaggctggtcccatctccttcgaggtggcatccttcaacgggcacacctgaagtggatggctgccagttggtgagacactggaaggaaatacacacagttatcacaggtcagcagagcttcatgccattttgcttcaggattattacaaaataaagtcttctaggcaatcatcaaaatcctcatctcccaatctataagatgccctttcctgtacccccgaaaaatggctttcatcaacaatgaagagttatcatttgtatttgctatttagtagataataaataatgtttataacatatcaagttataaagaataaaaaatgacaataaaagtggttcctaccttctaacacctagttaaaccaaaaaaaaaaaaaagcaagaaagaatattactctgtttttgaagtcccctatgttgaatgaataaatgatatttttatcaaagtgggcagtgctatacagggggcttccccagaatcatactctttatttcctacaagattcatacttaacaacaacaaaagtaccagcttttgtaatagcaaaaacagctgcagcacatttgctgacaataacatcgggttacttttcaagtgtggttgagtgttttcccttccctttgacctgatgtccataagtaaagattttaggatgtgtaaaaccctgagctctgacagagcaggcccctcctctcccccagcaaatgactgtcttgagtgtgctgggcagtgcattcctcagccttcctcctcgggggtctacaagggacctctgatagtctggcctcattctttgcacggctctcttctccataaatcacctccataaatccacactgtcctcattgagccgcggaggaatgaagccatcttcctatttgtagatgggtgtcacctggcctggaagatgataaaccaaagctttagtagctagacctattacaattttgcctagaagccacaagcagtggagacttactatggtcacctctccaaattaaatcttttcatagttctggcttttttacacactggagagtggtaatgtggagtcggacacgccaaaaactccagggttcacaaaggcttctaagagccattttggaacagaactcggtgatgtcatttctgggatgctggagcctgggccaggctgggactcagaagcaattcagggtccaggagcagagctggactggaggctgaagcaggtgttggttatagcttcggcccttatagacttagagtcttcagtgggcttagcttccctgagccctgctcttctttctggaaataattagacccacatttctcatctcagtaggttatgggaagaatcagatgacatagtccatgtgaaggggcttcatactgtaaagcactctaaaaataaaaggcttttttttttttttttggaaacagagtctcactctgtcgcccaggctggagtgcagtggcgcgatctcggctcactgcaccctctgcctccgcctcctgggttcaagcaattctcctgcctcagcctcccaagtagctgggactgcaggcatatgccgccacgcctggctaattgttttgtattttggtagtgacggggtttcgccatgttgcccaggctggtctcgaactcctgagctcaggcagtctgcccacctcagcctcccaaagtgctaggattacaggcatgagccaccacacctgaccaaaaggcattattttctgatagggatgaatctcattccacagactgagttttacaaactcaggtatgagttttagtccacatcattttgtcaacttaatttctgtttcatgatctatctagggctgccagatttagcaaataaaaatacaggacacccagtacagggcatcctgtaattcactggcaactttagccttacccttccaggccaccatccaggaaaccatggtcaaaatcgcttcagttccaccctcagtctgggccatagttctagggacttgggcaacattaaaataaaggagcaaccaagcaagttaactctggattgccccttccccttatcgctgttcatctggcattgttagggctagcaactctctgtggtcacactgggtacctgagaagttgctgccaaatcacctctggtcctgtgtttgcctaaacattccacaccgccacttttttagggtcttgttcagacaaaattcatgacactaggtcccctttgcaaagcacccagctatgctttttcccacaaaccctcgtttgcctccttcctcctgtaaaactcgattggttcacctctggacaacagcttttggcatttcaaagccagggagtcttgcatgctacttttcctttctgttttacaagttatcatccctgaggcagtgaaggcaaggctgattggctacttgcttgaggaacaagaacagaaaatagatgaaaaataaatataaattaatagttcaaaatatgttccagccatcattaaaattatgttcatctagcatgtatttaattataccctatattacagtgttcctttctcagtcctttcccgccctacatttataattctgggagggataagcatatactttatcatgtctgatgtcttacctgaagtaagtgctcagtgaatgctcaatgaacttgttttggtggcacgcagctacttaacatgacgttaggatgtagcattaatcagctatgaggctgtcactatctgtaacctaagccccttttaggaaaggtagcttctctcagtgataacgacagaccaaatatgacaaccctggtttactacaggtttgttcttcatgggtgtctgggtggggccagggggcctggtgcagacagttgacctggaaagagctggtgactacacagcgtgcttgcttttcggcgaggagggaagagcctgtttgcaaacagactcctacatgtgacatttggcatcatttctcactaatgacatctttctgagagccttgcagagattgtctgctgactcacccaagttacggtcacccagagacacagctatgtgggatctgagaagcgaattagcaggttgttggtctctaaaggtgcaggggaggacatggatgtagaaggggagtttcaagaggaggaaaaccatcttctagtttaatagctttcaaggaccatgtgcacttgctttgtgctctaagataattgcttcctcctaattaacctttcctggtttctcttttaaaaaaaaattgtaattttggctcatattgaaatgttaccttgggtgcagagaggtcaagctgccttggttcaaatcccagcccgaccagctgtgtgacctcacacaaattacttaatctctgaactccagtttcttcatcagttcaatgcaaataatgacagcacataaatacattcatcatgaggtagttggaggggttatgtgagaaaatgtgctcaagtgtttgctgcagtacctggaaaatagtaagggcttagtgaatgtttgctattattgctttcagaatagtttatctgtgaggcaaaggaagggcaggaatactttccatttgaaaaagaggatgcaaggcaggaggatcactggagtccagaagtttgagatcagcctgggcaacatacggagaccctgtctctatttttattaaaaagttaaaaaaaaacaacaacagcagcagcaacaacaaaacagatggtgagacacagagagaccgtgtggctcatccagactcacaagggaagtcagtagctgagccgggagcccctctttctcaatagaaaggtggagctagccgggactgcaggtcttatctcgtctgggcccacctgcccaagaggtctgtggatttctctggctccttcctgatgccagctctagctattgctatggcctcttctccaaacccctgtgcttctcttcatggctagggaagtcaggcccgtcatggctagggaagtcaggcccttgtcttggagcctcctcccagccttgcagcttcatggccacagattatgtggtgacccaaagatgactgcccacaggaatcatttgctttttttcatgagtctagagatcccttttctatgagacccaatgttttctctaactcacatcctcccagagatgatttcttttcattgcaaagaattgatcttatttttgcctttaatcttcatctttccttgtgtgaactttacccaagagaagaataaaattatcattagttcaccaagagccacatagagctgggagtctatcttacatcatggcagaacaatggccctctgcctggtaataccaaaagaaagtgtccggttctccagggatggggctccacaaagctcaggaccagacctccaggcaggctggctgctttgcaaggagatctctgtttggtgtcctataaggcaacagggaaaaggaaaattcacagggaagattaatgtctaaattaatatctagcgataacttttttggccctgagtgcttcagcaagagaagtcatggggagcccaatttcaaaaggcaaaaggtgtgtatgtgtgtacctgcattataactgcattagttaaaggccatctttagttctgattactctcgggaagaaacgctattaagaggggctttctacttggagaaagtgaagatagttaaaactctagcagagcaagtcagtgtatattcagtgaagcagacaggctgcagtgtatgtaggcaaacacatgcagactatacacccaaaatacacacttaacacacacataggtatgtgtcatgcaaactacttacctatccagagattcctagacactttcaacctaatcttattttaacatctattcgttttggatcaaaaagcacgtagaataaggttgggtccaaagggactgcctgatgttccaccccttcatccttggtgatcagggcagagcccctggaattgtcaatgagtcatgatgacagactaggaaaacatccaagatactgagacttggcagtatacaggttgtattagtctgttttcacactgctttaaagacatacctgagactgggtcatttataaaggaaaaaaatttatttgagtcacagtttcacatggctgaggaggcctcaggaaacttacaatcatagcagaaggggaagcagggaccttcttcacaaggtggcaggagagagaagagcaggggaaactgccctataaaaccatcagcttttgtgagaactcactcactatcacgagaacagcatggggtaaaccgcccccatgatccagtcacctcccaccaggtccctcccttgacccctggggattacaatttgaaatgagacttgggtggggacacggatcctaaccacattacaggttgcagttggggggtggggtgggcagggctgcgtgatgagagtagcctggcttaccaagtgcccagggcatgcctcaggcaccatgtatgtgtatccagacactctgcaaaaaggccaaggggctcgactctcatgtccagcaacaggaacggttgggtgggaggcactcaggcttcctggtaaagcagtctctcatttagggaactttggggaggaaaagacaaatggaggtgaagaattaacttttctttctttgaattttcaaatcctgtttctaatagtaaacactaggttgttgtcagctctttgtgcttggagagttgtgtgtgtgtgtgtgtgtgtgtgtgagagagagagagagagagagagagagaagagggggaaagagagagaaaatctttaaattttaattggtctgcaatggaagatttaactgtttaaaaaacaaaaccctcttggtcccagaccacaacttgtgtgtaatgtgggaggctggggaatagtgaagaaagagggaagggaggggtagattcctcatggctccacagggagtcgtgttgttaagggatgaaggaaccagccatatggacagtagaatacaatccagatctgccaactctctcattgtcgcatctcttaggtgaagaagctaattttttgctttttgtattatcctataaataaaatagatgattagagaagagaatgctttaaggtttaccatatacccaaattcagaggatggccaggctggttggtagttacgctgcaaggccctgaattacagtaagacagcagtggccttggggaccaggcattaccacttggtaggatgatttttttcttgtctgtgtcccctttcacttagattatgaggccttgcaaggctggaactgggcctgccttgtccaccacaaggacaagggcctagcacagtgcctggcactgaggaattgcctgttgaagattcgacagcaaatacctgttgaattttctatgggcattttggggaaagtataaacttgaagttcctatggccctgctgacttctatgcactgctgtttgtttgcaacaccaaccttgagcaataacataggttgcctttgaagccttttgcgctgcgtttcccccagagctccaaaggcgcagagtgccaaaggcacaagtactcaccagcaaggcaagtatgatgtctgccctgcttgctgctgtacctgaaactctagtataaagtgtctggaacatagtaaatatttgtcgaatgaatgaatattacagctgtgtcctttgctatatcctgattatgtagctgaaagatgaaagtagggatatacatactggtaatatcatgagtgtcatttgcaaatcctttccaaatggtgttaaactgagttgaatgtattgtctccattctcattcaaccttggcccaggtcatcagggaagatgctggtggtgttgctgatgatcatagcaaccacactggttataatgtttaccgttcaccttgccatgggccaggaactctcctatacatgttacatgcatcatctctcaagtgtttgtagccactccataatgcggacgttagattctctgttttacaaaaactgaagctcagaggctgttgtagtcagctcaggctactgtcacagaatataggcctacctgggggatattatgggttccatttcagaccactgcaaacaaagtgagtatcgcaataaagtgaattacacaaattttttagtttcccagttcatataaaagttatgcttacactgttccatagtctattttgtaacagcattatgttttaaaaacaatctgcataacttaataaaaaatactttattgcttaaaaatacggacacagaaacacgaagtattcctgctgttggaaaacatgacaccaatagacttgcttgatgcaggttgccacaaaccctcaatttgtaaaaaagaagaaagctcaataaaacaacgtgcgcctgtaccataaactgggtggcctagacagcagacacttatttttcacagttctggagactaggaggttcaaggtcagggtgccagcatgatcagattctggggagggccttcttcctggcatgcagctgccttctagctgtatcgtcacatggcctagagaaaacaagctctctggacccttcctataagggaattcatccatcatgaagattccatcttcatgacctcatctatacctaattccttcccaaaggctccacctccaaataccatcgtcttggtggttaggctttcaaacatgaattttagttggacacagacatgcagttcatagcagaggggttacctgtagtcccaaagctacgtagctagggagacgcagaggcagaattttcactcaggtctgttgagctgagtccaaagccccttctctcctctctgcatcacgctgagcagtatcatactcagcgcttggaggaaggcccagagggctcagtaaaagcagctgaagaaaaacaaattggagggagtttattatggttgatcttaaaagccttgtaatgaccttattttctccagaggacattctgaaagccagtgatttaccctggcagcccagctgggggaagatgtccaggcagccagttccccctacctgtgcctctgggcatggcagaaccgaacccagcagggactcccgaaggagccattcccatccacttttatttctctgagatgcacagaatatcagcccttcgggtttcgtgttgttctgttttttggtgtgtgtgttttttttttcccaaaacagtcgtgggcttctagccaaaagtcctttcaattaatggactaggaacagcacccatgaagaaaattaaaaacagataagaaaagaagggccttcatgcgcagagtagaggaagggaataattcttggattatgctgatgatttaccaatgttttcctaacgtgagaatcagtcagcaggggcctgggttttttatggaagaggaacctcttccagacagctcactccacaacaggcctgataaatccccacatccccacttccagcgagaacgctgccccctccagagccaccatgtcaaagcctgtttagctgttccttacttatcagccacaaccccaacattagttcatgcttggaatatgaagccatttcatatttattcttgttatatctggcaagaagccttaaggaaaaaaagagagtcccctgttggtgctgttcagctcttatatctttatagtctcccaaattgatttgacagggcaattgcaggccatgggtgagacgaaactcttctctcagaaaagtctgggagactaggcacaaatacacagcccactccttcagcttctgccctgagcctgtgttcacgtctgtgttcacatctgtgttcacggccactctggcccctgcagaccaatgccatagagtttcctcgtgtcaattttctggtaggagcctctgaaaagaactagggtatcggaggagacgttagcaatggaattcaccacaggacattctagaagctgagcagggtcagactcccacagagggtactgcagacactcagtaggacttcaaggccacatgagctttgggaagatgtactgagtgccctggtctgcccagaagctagggcccatattctgcaagcctcagatgggtcaaaagagttttaatccaaggaatagtgacaacttgaaatgatatgcaaagtttgtttgtgcgtgctcagacacactgagtattctaggaaaaaaggactagattttactgcatacatatgtagatacatactggtaatatcatgagtgccatttgcaaatcctttctaatggatttagtaggtaaacaaaggaatctatgaccccagtaagcttaagaacctgtgagcgaaggcagccttcccccaaagaataagtgccccactggtagtttgagatgattttaagtaagattcagacaaacttcttcttttactaggcatatacttgttttcatacagttaaaacctatatgtaactaatataccaagtttgtaatttcacagacattgcagatcaaggtgaggataaaacagatgtttaaataagagtcattaatggataaggtaaaacaagtaaacagtagtacaagttttgtgcctctatggcaaaattagctaatagtgagaagagactgctaaagttagggaaatactttgatcaaggaagaaaaacacggaaaaatgtagtcctcatcccctcttgtcccaaatactgagatgtttctacattagagcccctgtttctagtctcttccactggttgcctgcacaccattgccattcccatactcactcactccacgtgactttcctgctctagactacacaatggctccctgtggccatcacattctgtccacactctctaactgggtttgcaagtccatcctcccacctgatgtcatctccactatttcctagttctgaaactcttcacttcccagaccattcttttcattgtctgctccaaatctccccatctgccccatctgtactcattgatgccccattgctttttctttttttctttttttttttttttttttttttttttttttttgagacagagtctcgttctgttgctcaggctggagtgcagtggagtgcatcctggctcactgcaacctccacctcccagttcaagtgattcttctgccttagcctccctagtagccggaagtacaagcacacaccaccatgcctgattaatttttaatttatttttatttttagtagaaatggggtttcaccatgttcaccaggctgttcccgaactcctgacctcaggtgatctgcctgcctcggcctctcaaagtgctgtgattacaggagtgaaccaccacaccagccacattgctttttcctataattaccttcatacccccatgctccctattcctcttttgagtcccctcctctccctactctaaaaacctaccgtttgcagttcccaccaatgtctcccttctctggagtactgctgccctgcaattctgtatgtcaaggggaaaaaaaaaggagggagactttggttaattaccacttcacttggcaccaggaagggtaggctaagagaggagctatagccaggagtctaaaacttttcttttggcttgtttaaattgttgacaaaaatgggattagtttgagattaatcactgaaaaacaagggagataaactcctgggttccagagatattaattccttggttctcatcccagcttaggttatcaaaaccaagaattgttcatttttcacagtttatgaggtttatctttggcctgtcatgagatgctgacagaaaaatgaaattggtctgtttctagtctatttcactttctcattcccactctcataacaagtcaaaatgttccattgtaacacttaaggagggaaaaaaaagacgtgacccgcctatgtgcctgtacttcttgtcattatttggtgtttttttattctaaatatttttattgttcaagccgaactcaaaagataggtgcctctcccttcatttcaagcagaaagtgaattttaagtacttagtaggaaaagttgatggcaaattaatatgtgggggtggtttgagaacttttcatttttctcaggataaggcagacaagacaggttcaaaatacggacagtggcgatgagctggaagtgagaagtttcctcagaaagggctgaaagggttggctgagaattttttttcatttcatcctcatcagatgctcatttataaaaatagcaaagcacttggataaatgtgaaagtggtttgaaatgtgaaaagtactatggatttgcagaaagcatctttttcccattgaatgggattatttatgtccctctgtcatatcacaactttcctaacaaataagatgacaaagtaataaacttcttccaggggagccattcagtgcagaattcactaagaaagctttccgacgcaactcaaataaccgcttggcaggaaaagttatttgagagagattttagaactgaaaaccccaaaaaagaacatctagtataaattaaataatgcttcaagaataggttgtcgggtcagttgtaattgaatagccagcccatcagtatttatcagatgcttactgtatgctcagagctctaataactgtcagccgtgtatctttctttctgttgctgtttgtgtgaaggtaatttctgaccattcttcagtgagtttgatactgaccagatctatcacgttcaactctgtatcatattattaacgtcatgctctgacttctaacacccttaagtttttgttatgagttcttatgtaaaatttttgttttacataagattattgtttttaggttattgaacactttctgtgagttttttattgttcttctctttgagtaattcttcattgtaggcttaagcgttgatgcaactgaactttccatttcagaaaagattacgttaatatcctttacaaatctttttttttttttttttttttttttgagatggagttttgcttttgtcacccaggctggagtgcagtggtgtgatctcagctcactgcaacctctgcctcccaggttcaagcgattctcctgcctcagcctttcgagtagctgggactgcaggcacacaccaccatgcccagctaatttttgtatttttagtagaaacgaggtttcaccatgttggccagaatggtttagatctcttgatctcatgatgcgcctgcctcagcctcccaaagtgctgggattacagccaccgcacccggccataacttcttaataatgatcgcagcatttgttgagcactgattttttgtcgtcaataatgatcgcagtatttgttgagcactgattttagcaagtgataggcattactttacttctgctatttcctaagaaggatggggatacccagaccccaagtggaaaaaatcatgaagggtctttgggtcatctccctactccaagccatgagccacaaggccatcgagctcaagaggaatgactgagcagtccagcaggtccacttttgcatgggtcttcccgtgcaaaagctcccaggtgggcgtccactctgtacctgcagccccagggccggccctccatggtgaagccagggctgcctttgtgagtcccgtggctgcatatcctctgtccacattcctcggctttgacagtgtgaggcagggacttgggctgtgtgcctcctctgcagaccttcaccctctcaccctatagggacactgtccaaagtttgtgggaggcagcactaggaagccaatgtgagtggggaccagatccctgagtccttcagaggagttcatcagcaatggagcccatgttctggtctccatctgcctgcttcacatgggtctggaattggaaggggatggggatatgattagttatcactcagcaccccaaaatacccacacaaggctctatgtagctgtgctgttttatttgatccaacaaccttatgggatgggggtaattattactgtttatccaatcagaaaaccaaattaagagaggtaaagccagcagcacaagatgaactgctgcagatccatgcctgcagatctgggattgaaacctgactgtatcccactccagagccagaggtcttgaacccattaccagaggctctcatacttggaagttcattcattacctcctaaagggtgactcacctgtaatcccagcgctttgggtggtagaggcaggaagataccttgagcccaggaattcgacaccagcctgggcaatgtagtgagactctgtctctaaaaaaacaaatttaaaaatagctgggcatgctggtgcacacctgtaatcccagctacttgggaggctgaggtgggataatcacttgagtctgggaggttgaggctgcagtgaaccatgatcactccactgcactccagcctgggcaaaagagcgagatcctgtctcaaaacacacacacacacacacacacacacacacacacagatttctgggtcccctcccagaatttctgattcagtgggactggggtagggcccaagaattcatatttctaacacattcctaggtgacagtgatgctgctggtctggggaccacactttgaggacacatcttttcaccctgttcaatggccttttgttttgttttgttttgttttgttttgttttgttttgaaatggagtcttgctctgtcgcccaggctggagtgcaatggtgcgatctcggctcactgcaacctctgcctctcgggttcaagcgattctcctgcctcggcctcctgagtagctgggattacaggtatgcgccaccactcccagctaatttttgtatttttagtagagacggggtttcaccatattggccaggctggtctcgaactcctgaccttctgatctgcccgcctcagcctcccaaaatgctgggattataggcctgagccaccgcgcctggcccatttcttagttctaaccttcaaagtttactagtacatggggtggcatcaaaacattataactagaagagtaaccttaattggatgtttaactaaaatacctacaaccttgcatacaaggcagaccctttggaggcattttggaggtggtgctggttgtcctttctatagctgaaaagaaacaaggaagggatgaaacggatgtgtttcatgtgttttaagccatgacaaagtatttcattcttcaaatacattttctggtggcattttattctagagccaatctggatgactttctttcttgtaactctgtgagatcagcagccatccctgtgtcccaagtgactcccacagtttattattgagagcttccacctggctttgaatatgaacagaggagagagagggagggaaggggagagatggagggagagagagggcatggggcgggtagagagagagagcttggcctcaaattctgggaaaggttatcacatgaagaatggagccctgatctctttatagacactacagataaagccatgcaagggttgcggtggatgtgaagtgccaaggacaaactcaggtgtgccagaaataccactcctttgaacctgatgttgacacttgaatccccatgtcataggctggttggaaatgccgtgccagttgctacctaggtcttctctcctgtttcccttccaggacccctcccagcagagttaggagtttgcatggtgaccggaaacaaaggatggtcatcagcagtcccagatcacccaggcccactgaggtctcctgcatgcagcagctctgcatttctgggcttggatgagaaagggaatttggggcaaggcttctagaaagccacgcggccatgactctgtggggtcttttgcctctcccaaatccttgggccccacgcatacctccctctacccccatccctttctagttttggagaagaccctccctctttcagttaattctattctttcacaataggacttgattccacaaacccagaaccccaaatcctctttccagggggtacagaaaagtaattgcagtctctccctctaaagtggggggatggggtaggaaaaacaacagagctcaaatttgacacaaattctcagtcgaagtgtttgccccttcccaaccctccaaatccccagggagcctctgagcccagcttttcccaggtcccagtgtgacctctcaggagaccagcttccagaccctgtgtctgggaaggtacaggtgtcgctcttagagaaggggcacgcgatgcgtcacagtcccctagtgcaccaggcataaaactgagggccacaggagacaggattattgatcaatgaggcggttgatccctccctttcatcatgatttcttgagagtgcactaacccggcctgacagctgtgaggatgacccactcacagagacctgcagcagtcaagatggtcctgcagaagctgaaaggatcctgaatgtaaatagaccatgagccacattctcccacacatcactcctccactccacccggctcaggccacccacctcctgagacaggcctgagactcacttgcttttgcatcccagcggaagccgtaaaaatattggtagctggggcccctcaccgtcaggagcaccacttcctatcacctcacatggggattggatggatgacctgatgccaagtcactggccagcccagagggacatgaccatgtatgaagggccactaaaaaatccgctgctgtaacattcatcagtgaaatgtctacaagccaagagttgttggggatcgaaatcaatagcttcttacgtgtttctgaatttactgtggcatcacgaagcgcttgacgttatatccaaagccccagatatatgcaaacaagcccaaagtcactggaagaagtagactatttcttttgcataggtttggggcagggggacagtgtacctagggaagaatattttattgatgttcattaaaaatgaaactttagctccattttcccctcttcccttcccccatccactgaaaatggaaccatttaatgtcaccctggtgtgaaatgggaaaggatagttggagctcagatgtccctctgttgacttcagcctaggtaaatcatgtgtctctcgggaggaggcctgcaggtcaggctttgcgagggctgtgcttgcagacttaatgcctctctgtttgttctccctctgaaagggcaaaggcctcccttcaagaaaagagcttctcccagcaacagaagtctccccacacccttccctgtcccagctgccaccagccacactgagctttgtggagctcctgccctgtgcctggccccgtgctaagtgctatggtggatatcattgatctcagtgtcagatgtctctatagatggtcaccaactgaatgtcctggggtgggagggtgatggggttactcacggttggtcaagaggaaccagaaagaataccagtgctttgggaattggccacaattgccaaccttctcagggaaatcaaacatggtgctgaagctttgtatgagaacagaggcccagatgtccaaggctgctggccttgccactgaggagttgggctgtgtgcagggttggggtcccagcttggtgctggtttgccaggtgagcaattacgccagaaaggagacagggaagcagagggagcaggggaagctgccatcggagaccacaagttcccaatccttggaaactgttttcgtctgaccaatgaaaaccgtttattttgcaaatgtgtcaaggggctcctttcaggagaagaaccttcttgatactgatgattctcagttttctgacagtagattacccaaggttttgggtttttcccctcataccaacgaacacaattaaaagcactttctttcatcacttaatcattgagtacctggggaagacaaactagatttagaattagcttgtgcaagcatgactaaggtattacaatgaggaatagatactaaatgtaatcgtttattaaaatcatgttcttaatttggtggcagaatcaaagtgacttttggcatgtccatcctgttggatgatctaagtggctaattcttccctgttctactccacactaccccctttgtagaccagccttaaacagctcctttgtgaacattcttctgctgtgagtataggaaggctttgtttgctctcacactgggtcaatttgctggttgcacagtggagatctgaaggtgcaatatgcgtgctgtggttgagtgacgtacagaagatgggactcttaagtaagatcacctggtatgagccctgcctatatcccctactgattgtgtgatcttaggcaagacaccagatttcactgtgcctcagtttccttatggaaaaataggcataataatagctcctaacttcataggcttgttgtaagcattataggagacaagacatgcaaaatagaatgccagggctgggcgcagtggctcatgtctgtaatcccagcactttgggaggccaaggtgggtggatcacttaaagtcaggagttcaagaccagcctggccaacatgctgaaaccccgtttctagaaaaatacaaacattaactgggcatgattggtgggtgcatgtaatcccagataggaggctgaggcgggagaatcacttgaacctgggaggtggaggttgcagtgagctgagatcacatcattgcactccagcctgggtgacagagcaagactcagtctcaaaaaaaaaaaaaaaaaaaaaaaaaaaaaaaaaaaaaaaagtagaatgccagacactggtacatgttagtagcattagatattattattctgtttgtaaccactttgaccagcgaatggcaaagctgttagccttggaggtaagatgggatttatgtgggtgtgaaaacagataatttggttgggagtaagaggggattgagatggacagataactaaattctgggatggtacctttcgcctttatggggtatgagcaagttccaggtaggaaaagtgtggaaaataaatgtataggacaatgtcaaccttagggctggttttctgtaggattccagaggatgcctttgattctcagtaaaccccagaaagccctgagagaggctcttcaccagctccagcagcagaggctcctcccctatcccagcactgaggattccattcaccttgtttttctttagggtcatgactcttaccaaggggttgtggagtcttccgaggagccacccagctgtcccactccagggcctctaggacaagggtgtctgcagacagcctggtaaagtctttttcttctccaccgtctcctcctacagccacacaatgagccaatcaggggcaaggttgcagctggaaccctggctcccgatgtcttgtctgcatccctcatacccatcctgggcatcctgcaattcccactgactctagaagccctcagtcagctgctgtgagaaactgacattctgtaaattctgtgttttgcctttgttttgtttgtattatgttataacatcaagagaaacccaagggctttccccagaatggggaaaaagcgggatgattttgatcacgtggctctaccatttactcagtggggaagagaaggtggcccctgaccaggaacaaggtgatagatttctgtgcccgtcttcactttgtgtcttgtttcttttctgcctatcatcatttagtcaggagtttttttttttttcctgtgtacttagaaagtatatgagaaaacagaaactctttccataaatcttgttaggagagagaagaatcctgtagttacttaggatggaaaatccttctaagacaaaagggccttcagagcaggctgtgggagcacattgagcccacagagagaggttgacccccatgggggattttgtctggcctttcacttcctaataccttgttgtccacatctgtgtagtgggtctccatctgtcctgcctgcttctgagagatgacagagggagtctctgaaaaagccaggcgtcagatcctgtaggcggggtgccatgggcatggcctggacaagtgaagcctgacatgtgggtgctctcctccggacccggagcccccctgagagtgcagagccctgaccctcacagcagcctgtcagcagcgcctcgagcacctggctattctgcgcttggctgacatctcgggattcctcagtctcttaggagaaggagaggaaatgtgtgttttcagtttgggaaggaagacacacctctaaatgtcagacctgaggcttccgataagcccataggatattttcatttcggaactgaaaagagccgacccaaacacctacctactgaggcccatgaagctcacactcccagagaggttcaggggtaaatcttgcgccgcgtcaccctttccagtgaagagacggctttgaagcttgcgcctcgctctgggctcattgttctgcgtgtaaagggcctttgctaacacccactggcattttctagtacaagggaacactgtgtcaacctacatgaaaacggaaatgctaatgcacctgggatttgagaccacagcgccccctccatgttcagtaatcctggaggcagcgactggaaaatacattccatgcagcacagattcatttagagcaatgtctttcagactctgtcccttggaaccctgaggttccacagaacacatcagggactggggcagggggacagatggccgctggaaatgggtgccctccaggcctgagcaggaccccaggccttcctttccaacctgaccagagaacttttgcttccatttttatgctgtggttctgcacacagctccattcaacagaaggttcccctgctttaaaaaagagtttgaagacccttggccgaggtagaggctctattcaatctataattctatttacaagacaaaaataaataacctatttataaatccagcttaattagccctcgcataaagtaaaagtaaacctcagcagaattctacaggattcggtcatcataattctttctcctccttcagatgtagttgagggtccttgcgtctgtcattaagctcctcactccccattcataaggctgccttgtactttttgaaggatttccacagactccttggctgggagcgtgagcaacctcaaaaaaccttcaccagcccgtatgaagtgtctgactaaaacgcaggaggtcattctcttttctgccaggggcagcttctcaaacacagaagggtggctcaggagagggggtggggcaggggccaagtccaatggcaaaggcaatggctttgggccaaagggtaaaaatgcttgttttcaggaaaattagaaaaatttgcctgaggcaggtcccacttacacactgagttcttatatgggcccttttatattgctgtttactttgctttttaaattaaaaaatcagtgcctgccagtcagggggcctctccggccctgaaagggtctgccgttgcccccaccccagctccccaccccaggctcctgggtcagagactgatgggaattgggcgtcaagagggaaatgtgtgggttagaggcgaatgtggagtctgggctgtttttctgtatggtaatggacaagccagggtggccattctgagacaggcactttctcctctccagtctctggggtaggcctttgaaaacaattgccagccagaatgactgaaagaattttcctggggatcctgagcaaaacctctgagagaagggggaggctttccctcgtcctccctgatagatccccagggcactgcattccccaggctggcatttccccactcctgcctacaggtttgctgctgggggtggtgggggcagtggggaggccaacatgggaagccactgtttgtgatgcctgtgactcagcccagcttctagagggctgtggcccacacagcacctggggctcccgtgtcccctcccaagcctggggctgtaggctctccacctgcttcccagccaggcaggtgactgccccatgctggtgagagctgaggccttggagcaattcagactctattcctaccacttcctcctttggaggcctctgagcctcagtgttcttagctcaaaaatgggattacaactacaatttgcttgataaggtttttggaaggacaaaaaaagagacaatctttatgaaaccccccagttcagagtccttggcacatcataaccactccccaaaacattagctattatgagttactatagttagatattcttgatgggaagcaagtgcttctagtatagtatctaataagagcacctcccagcggtgccagttgctagctgtgtgatgtcagataaattcctttacctttctgaccttcactttcccccttcacagaatgaagatgaccattcccatcccacaaggtgacagtggcccaatgaaagcagcaaatgcaaacaagtacttagtgcagggtctggcacttggcaaacaggcaataaatgatagctgctgttactcgtggcagctgtcgtgtggcattctccaaggacaacataatgttattgggttttgtttttctctaagacctccctggagcgtgttcttgcagactgacccagcagtcagctgagggacattactaacccacccaagagggacaggacctgcctgaggtccctgtacctgcacacaactccattcgacagaaggttcccctgcttttaaaaagagtttgaagacccctggctgatgtagaggctctattcaacctataattctatttacaggacaaaaataaataacctctctgggtccccttcactctccctttagaatgatgctgttttgacactgggctggggcagggagataattgttttaaatttttttattctcatcaagtttgagagaatgcttttaaggctgtgaggtggtcatgaaaggtagagtgagaggtgaagcccgccatgtgaaagtgaaatagaattgagaagatctcacgggatctgaatcacttcaaacaaacaaacgtttagcattcaaacaaaggctttctgtaaaggttttagagctggggctggagtttcttaccctgtcccaccctcacccttctctgtgactctctcctttgttgactggggatgcagggaagagaggagagattgtgggaagagaaggtggctcgtggctatgctttgcaaggctgcaattgccaagggtgcaagatggacatcctgatggaccctgatgtagaaatcttgcctcagttggactgtagtgagttcattagacaatcccatcctctctcacatcttcaggggaatggaactaggaatctgccagcttggcctgagaagagggccctgtcctgaacccacatgaatagcaggataggcggccgtggaactttgatggctgaacctggactttcttgtttactcagcttaacctcttgactataatgtgccaactacatatttattcacagaactgttagagataaaagggacctcaggggacattcaacctggccccttcactttgcagaaaacggaaatgaaacttcagatgggtgaataacttgttcaggtcccatcctggtttctggcatcattggggtgaaaatccagatctctgagctgattttctacgtttcttgttcattctctctgatcttctcgttttagggtggctatgggaacagtgactaccaattactttcctgggtctttgccctgctttgcactagtttgtgcctgcattttccattctggtggatgttggttaccactcagatttgcctcactcttttaggatacaactagttcgcgctttagaactttcagaattacattagatgcagagatgttagctggaacttgtcacctcacattctccctctgctcgggctctcctccttaccccaaagagcgagacaagtgtggcaaatcccacctgaaagtttgctgcaagtctcctgctgtgttttcagcaaattcatttcaggtggctgtgcctaagtttgcagctcatcttctattttgtagaagaatcacttgggtggttccttcctctcataggtgctttccttccctgtcaagtttgttttggaaaccaactttttaaactttttgttactaataagaattttgttttgtgggaattcctaaccgaaaacaaaacaaaagatcatttcctaaggatgtatgcttaccatattccgtcttgtatggatttgcctgcttttcatgtctttgcaaaagaggcattctttctgttctgttctgcaaggctcctgtatttggtgtagctttctaataaaatacttgaattcagtggtgtgtctctgaggcaaattaatttagtgccatggttgagactgaagatgtaaatgtccaataacattgagagcaggagtttgctttagcaggatttgttaatgaaagtacatccagaaactttcactttctgcagtgaacagtgaggacaaatgctggcctggctgagatggggagagtggtgtgccaaggagatcccaggagagagatgctgattcttttctctggaggcaaaacccaggaaggctttcgaggctcaattctagtgctgcctgcccctgggggggggtctcctagttgattctcctccagtgtgccaaagtgagatccgtgaagattttccatccaggtgaaatttaaatcccacccattcacccttttatataacgtatgcatgttaattgcatccctaagtatttggttggaagtttgctttaagttagatctcgcagtcttcctgagttctgccctgttttgctatttcccagaagctcttttgagggaacgtccaggaagccacacaccctccttctataccctgcagctccaagtggtcgggagcccttggaaagagctgagagttagactcaaggatctgggtccttccctgccagcccagccatgtgacctgggcaagaccattctactctccccatcatgcaggatctgagtgttgtctgtgttcccttccaaatataaaattatggaattgtaggactttgggaaattgcatgtccacaatttctttttccatgggaaaaaaagggaaaccatatctatggagttacagtggagatgtagcagagatgccctagagcgagcaaccatctgtgtttgcctagcacggaaggattttccaggacacagggcttcccgttttaaaacccagaaagtctcagacaaaatggtcaccataggtgcacatatggtccattcaccagactccctgacaccttaatacaggtgcaggatggcgaagcccagcctagggaggtttctaaaccccgcaggctttctgatggagtgtggctgaaagaaagggggagacaggtgccagccacattccctagaagagaacaccttaatgtgcagttgacttgtttgatctgcttcagctgtgacacagtggtcccatgtgtacaggtagtgcactcacagaaaatggaaccaggggcctatgaggatattcagtccccccacctacctaacaccgaaaaagaagtcatctatatattccataagaaatcatttcgttctttcccgttctggaaataaaagcttcctccataatgggtgggctgccaccttgtggccatgagtgggaatgtgggaaagtacaggtaaccacagaggactaaatgcctctgggtttaaatcaattcggttcctatagggtacgaggcagtgagctagatgcttgtgtggctaagactatcattatgttaccaagggtagagctttactgtgtgcatgtgataaatacgcttagcagtttgcatgtagtatctcctatagtgtgcttaacaaccctgacaggcaggaatcatcaccattttacagatgaggaaactgacactcagaggttaagtacatttttaaggtgacacagcaaagagctaggatttgaaaccaggattggctggccctaaagctcatggtctggaccactaggctatactgctagagagattagcgtgaatagaaaaataggaccacatagatagtctgggtgggagaaataggtcattgtgaatatgtgggagagattaacttggtgaacataaaggaagaatgcaaagcagggagtgactctgacatcaaaagcagtggaatccagagtaaagagggagagagaactagagttgtcaggattccaggttaaggggaaggtgggatttgaagtagctgttgaaggatggataggaatcagatcaacagagagagctacagcttagtgaccattaataagctggccaagtccgtgtttgataaatattagccttcttttattttttgagatggaatctcgctctgttgcccaggctggagtgcagtggcatgatctcagctcactgcaacctctgcctcccgggttcaagcgattctcctgcctcagcctcctgagtacctgggattaaaggtgcgtgccaccacgcccggctaaatattagcctttgtaaacaatgtgtatatcatgagttaaacccacactaaaggctttttatatatgtatctcattaatgtgcaaaggccctgcaaggtctttgttgttatgacccccattttataggtgaggaatctaagcagtagagaggtggtcactcacccatggtcacattcataataaaggagtcacaatgtgaacccacgtccttctgactccaagcctgtgctaaaactgcttgtggtggagaaaactcccactagcacaggaagggagggccatgctcacagcatgcctggatggtccaggtcatgcaagttatgataaaggagagagcgtgcaggggtgggatggacgaggacactgagaatggagatgggggcctggatgctgatgttttcgctgataaatatgttgaagcctctccctgcagctaccaatgtaccaatgtgagctgaaaagcatcatggtacccaaagggagaggagggctatggaggccatgtaagaagggcgccaccgtccaaatatttcctttcccttatctacaccactgggaagtgcggtgcatggctccttcacaaactgaccgatctcaagtgggttaattctccccttttggcctccatttcatcatctatcatatagggatcgtgatttttgccctacgtcatgaaatttgcctacttagcatctagcactgtcagggaattgggagaaccagacgtaagaaaagacatgaaagaactgaaaagtatgaggtatattacatattctgattttgtaaactgaatgcatatgccttttgagaagactcagtgtcagccccttatagaaggcatttcttcgtgaggctggacgtttcatttgaaaagccttactacatgatgaagtgcctttcagtcacaaggttttagggaaagcaaacccaagtttaaaaagagatgattgacttatgggtctgaaaagcttgggagtgcggcactcccaggcatgatttaaccaggggttcaaatacaaccaccatactctgtctctgtatctctcttcctaccccccgccatcatccctcctttccttctcttgttttttctgcattggctccatttgcagagaggagccctctcctcactgtagcaagacggccaccacagctgcaaacctcacagcctcccggttcaaggtgagtctttgtccctgcattcctgtgagcacatctgctcccattggctacagcatggtcacgggacagagaatgagaaatgctaattgccttagcccagaccacatgctgcgcccaccatgcataggaactgaaattagggaggagtggacctgcaaataaaaatgagggctgttgcagtaaaacacagggaaagaagtgctgggaaggcaagcagtcaaccactcagttgttcccatgcaccatgattgcttttctccttggtttgtcatcaccaggacacagactccccttgccggaagcaaagcctttgcatctggtttgctccacggcagttcagagattgctgaagcccaatctcatatgacgatccaagatcttaggaagtccagaaaaatgggcaggataaccttggaagccaagatggcatattcgtggctcagttcagatggtacaaggaactaggtcctgactcctgggctagttgtggaaaaagttcaagcgatctttaggttcagtttaattccccacccaggaattgaactcttcctgcaaggtgcaaagcccagggtggccacggaaggaactctgaacatccctgatcttagagaattcatgtctagtagagaacacagttgggggtcaagtaattgtcattctaagaaatggcctgaaaattttagatgactcccttaccggtttcttgttgctttcctcttagcatttctctcctatgtgtgatatttctggatcattacttctcaaagtttattattataatcacctggatgcttgaaagtgcagaaatagaggtcttactttagacctcctgattcagaatgggaggtgcagagagcagcaatctggtgtttaacaagcagcctgggttgataaggccactaaagtttgggatgtttttctgtgatgtatccatttttcctgtaactcacagtttaacacttaactgataatcagccttatattacatttgtttgcctctaaattctgaaagtagcccattaaagcatagaaaacagtgtaaaaggggcccttctccttggaaaagtagggcacaagtggttttcagagttaccctgacattttcacagcaagaggtcattaggccccatgcagcctcaccttgatatttcagtggggctggaaaaagctttcccctgttgttggtcttatacagacagcttggaggcccttaacttcacaatgatcagaggcgataatggttaaaagacaaagtgagccaaaagagagggtattgacaggaagcatgccaggtgacttaattgaatttgggcaattcagatggggtagctggttctcatttaggaaatgcagattgaataaccagttctcttgttaaagagggcgatgcaatttgaggagctctgcatcaggcaccgacgggcccagccagtccccacattgagttcttgcccctacccgtgctcaccagcactttaatttacttgagatttgcttttccttcctcctttgaaaatttctaaagttctatcattatttttaattttatggtactcagtttcaaaatcaagtaatattctagtttgttgcaagtacattttacagtatttatattaatacttattttatccattatttttccattaaaaaaaatatatatatattttgagacagggtttctctctctcacccaggctggaatccagtggcatgatcatagctcactgcagcctcaacctcctgggctcaagcagtcctcccacctcagcctcccaaagtgatgggattacaggcgtgagccaggcctctcttttcttttctagcctccttttaagatagtaatgatgtcttaatgtcattttaacctaagactcaaatttggggagtttggttcttttgagaaaggaagaatttgctgtgatttctctgctcgtatcatacctccaaaaaccttttggaaatagattatactgttttaaataagtacataattataacagctaatgtttactgtgcaccaagcactgttctaaatgctttataatttaatttttatttaccataatagcaggagttaggctcccccattttgcacatgaggaaattgaggcacagagccacttatgtgattttgctcggggctcacagcttagaacagagcaaagaatggacatcagcctctgcccttctccaccactgtgtgctaccaccccaaaagaatcttagctgcggagaaaccagacatcaaagtcccactgaggatttgtgatatttctgatgaagaagatattttctcccatcctaggggaacggattgcagggcttaggtgaagaaaactgtagcactaacttgctactgatttatgtgaaaagataaattggcaccagacagggaaatccctggctttaggtgatcttggggagtttacctgggggataaagcttgtgagatctctacaaagtgagatgcattttattgtatagaaagtgatgttttgatccctaagttttctggagccagtagatatcaggaaatctgacttagccttttgacattcaaatccatcttgaatgagaatggcaatgtggcttgagacaggagcatcaattcatccaggtcttcaggtcagcagtatgaccccttcttgcctttcagttttaactattccatgacttcaataacatgggaaaatacatgattattctttctcaaaagaaactaaaaatgtttcagtgaaattacaaggcaacaagggaccatggggataatgattgtgtttgaaataaggtctcagagccagtacaacaggagtccctcggcataaaataacaagattacactccagaaatatctcaatccattaaccctccatcagtttagtccaaagagattcttacaaggccctgatgatccttcgaagcaccactcagctagagttttagttcagagacaaggctgtaccccaaatgtcagctctagtccactcttgattgtcttaattaataaaaactttgtgaggactaagcccatgagtcacaggcccaaacctacttagtgcttctccaattatgtgtggagatggatttttttcttaaaagactgcaacctatagactaatacatttgtaaaatactataaaaataacttactagaaaaatgaaataaagatattgttttagtctgttttctattgcttataacaaaatacctggagttggttaatttgtaagacattaaatgtatttccttcagttctggaggctgggaagtccaaggtcaagggggtgcatctggtgagaaccttcttgttgttcaagactctctgaagggtccttaggtggcacagggtatcacatggagagagagctgagtgtgctagctcaagtctctcttcctcttcttataaagccaccagtcccactcctatgataacctgttaatgtattaatccatgaatcatctctcaaaggccccatctctccatactgccacactgggaatttcaacatgagttgtggacaggacaaaaaccatagcagatatacagaatagaagcacaaatatttaattattagattacacaggcataaaattacatttcaaaaaatatcagaatgcacataattagaagaaaggaaagaattacaaatctgtgcatgtgggtcatggaaagtgtggtggttaatatcatatataggtggttaatatcatgtacacaaatgcagcaacgtcacattgctatcatcatttttagatactctcaacttcagtgtttatgtcttcagggacctgtaatcaacagttcatggactggcaatgatcacctaagagttaatgggactccattcttagccttcagtgcccttaaacatccaggctcctagaagtttcttgggaaaccagatgtctttgatacaataagccaagactctaagaataatgtgctttacattaattcaaaccatttatcagaggaatatgagagcagatgctgtattttagaattcagacatggagttattgatcaaagaagaaattaagacttatggttattatagtaaagggcaggagggatgggggcagcagtgcttggagtcctggataacccattcagctctatctacaataatggaagtcagggagtgttggcaggatcagtgtctgctgattaggtctactcttggctcctctggtgaggatttgttttattttgatgggcataagggaggctctgcgcatggaacctccaccacatgcattggtgctactgcttaggaagagggagtgatcctcctgcctcagtccttgaggcccccaagcctcattgcaatcccgggaatctgtcatcttcacctgtctattcagatccaatccccaccctctttctcccctacccccatttaccaaaatctgaactgttgcgtagtcagtccctattggcatgcaccccacagtgagccaaatgcatattaatgaataaactgacacgtggtccaaattacatgctacacaaattgtagcaactttgcttgtgtctaatatcagcattgcgcacataatgacaaaatcatacattgagatagtttctaaatagcgccttgcatgtgaatgttgaatattttcaatgcttttattcttatttaaaaaaatatctttttgggaaaaatataaattagcaaaaagaagaaattcatctaagtcagtacttgtatagaactaaatcattcttttccatagcttcatggtatttcattgtatagatttaccaaaatgatggtaaccattgcttttgatggacatttggttacatattcaaatttttttcactttacatcgtaaacattttcccacatcactaaatattcttctaccctagtgtctttaatgactgaatacttgcatggtattctattgtatggatataatgctaaattcaatcagtaccatataattacttttctcccaaacttctgctgttatcaatagtgttactgctgataccgttgtaaatctatctttgtctgccttcataagtatttcttgggttaagttcttagccttgtagccctggatcaaagggcatgcaatattctggggccttcctgaagccttgccatattgcccaagttgaaatatcatgtgggaggtggaaagagcttgaagtgtggagaaagacaggccttgatcctaatctttgctctgccacttaccaagctgggtgacctttgccaaaaactgatattctctgagcctcaatttccttgtatagcaaaaggatgaaagtaaaagcatttacttcgtaggacggttttgggactcagataaaatcatgcattttgagccttctgtgggaagcagccttccccttggtcattttggaatggtgtacaagcaaggatgcatttttaattcagtctgccttctccatcaacttttacacgcatctcagaacccgggcaccactccatagaacattttagccagggaggagagggcgtgggggctggaatttcaaaggcatgtagaactggtctagctctcttataatgtgaacaaaatttccacaaacaaatggttactagataaaaagggtttgggattggagtcttttgagggctgtgtcccctgctctaaagtgtggggcctcggagttgtgtgtttttgctgcttggtgaacaggatgacaatgtctggttctgaaatcccaggagctgagggaagcccctttttgcccagttcctgttctccgagggttttttgtgaagtgagcctaggagctaagaagagagagagaaatgaggtctgctgatccccagcaaaactacatgcacctccctttcatctgttttggttgaaaacctacgaaggttaaaatagagaaaaccttcagggcaggcaagctatatgtggttagctttgtgtgggaacctgagtcctggagactgccctgacttttgcagcaggcacatttgtatgtttggattttccagaagggataaatcacacaaacagagcaccttgggaatccttcagggagtcctgtttggccccagcccccttctgttaaacacacaccccattctccaggctgtggagagtggttcaaacactgcccttgtctgaagagctttctctggaaaactcattcttggagagaactttctttgtgtaatagttcagccttttagactaaacagacgagaaaatagtgaagtacagaaaaaaaggagttcctcctggtaaacaggggaagagttcctttgggtttggtatcctctgcctctctgattgttgcatgccatgttcacagtggtaccccagccaagacagatactgagaaacagatcctcttttccactatgtcttgttttctcattgcttggatggtgttgcaagcctgtctggcctccaagtgcacatcttgtcctcttcgggccccaacacaggcctgtgatatttagcctgcagagcagcattcgtttaaaatcaaagctttgaaggttgatctggtttgagagcaaccccgaagcatgagattctttgacatgtgggccccttggggctgtgcggaaagaggagagtccagttttcccaggatgagcctggagtgaggttgaaggatagtctcctcatttatgggcctagctctgaaaccaaaggaaggacaattgccccaacctccatccccatcctacctccagtcaggctggtctgcagtgcacacatcctgcttttattacagggtgcatttcacttacagacccttccaccccagccaccccacccccacctacacccccctgaaatgagctccccattccattaaggtggatgacagcaccctcccagggttaagcttccaatggaggagggagagaatgttggaccagcaatttcggaagacagttaaaagattagatagtaaatttacttaacagagactaatcacctgggactgggtttcatatcctgttttgaaataatgtattttcttttgtgctctggtctgaatctgtcatccctcctctaataatgagaggcagtggatttttaatctttgaccttcttccatataatctaatcacatggttttctgatccttctctccttatgtggtgaagttctggaaagaaaaagaactcatttctcaggcattgctgggctattctccattgctataaggggctgagttgacaggtagaatcaggttctgcctgttagatgttcacctctaggcccttaaaatcaaagggtggaggaggagaaagaaaagaaaggaaagcccaaggctcttaggtctgaatcagatgaatgaagggtggcaattggaaactacaataaaacattcacaacatctgtttcataccagtgcagcgtagagagctgtgagtcacaaaatgggagcagtcataggtgaggcaatttctgagtgtaatagcactagaaatgagaccttaggtaatcctccaattgtctgcacatggaaacttctacgcacttagcagctttatcttcactttcaaactgggaggtcctgggtgtctttccttcctcttgggtttggctcataggcgggatgcctggggtgcctgaccctaggcaacccctccagaagtcttccctctgtgtgggattgtcagatgaggtgtctcttcagactccttgactttgggagttgccccaacaggagtcctgcaggctgggaggttggattcagttctaactagaaatgggagcgagaggacagaggaatgccttcacttcacctcctgcccatctccctattgatgtaattgttgcttgattggcagaagaggtgtagacaagatctgtagcccctccctcttcaccttttccatctctgagggctcagggacactttagatacagccatgtcttttggctgcttagccagagttctctaagttgaaagcaacaaaacacactcaaatttagttaacttaaaaaaaaaagcatttattgaaagactatggggtggggcatctagaatcaaagggaaggttgaaaaacaaggcttgcagatcatcttcagaaggtattgagagcagcaattgctcaacagtcagacccaggcatcagcgctagtgaacagatgccacttaccctcggtcttttgtgccctttgtctgtaattcaaatgtcatggagggagaacctcactgacccagcttgggtcatgcatttggtcagagcaaggtagggcatctggattgatagtcctaccagattgtacccagggaaaggaagttcctcaaaaggtaataggaggatgtgcttttacccaaagaagatgaagacaatggtaggttagccataaggccagcacatttctgccaaacatccacaaatccatgtctcactggagtctgaccttgctgagtaggtcttgcgatggggcaggcagagcaatccaaaagagatggcaggagaaactgatggtgctctcttctcttgcctccttcccttcacactgtgccactgtcgttaccactcctacacccatccccccatcattatcagaatgggcagattgactcccagaagttaaacttttgggttgaggttatttcatttcttatgaatctcccaggttctaatcgtcacttgtcttcattaacttccctcctgggcccctttgttccccactgaggacctcccccaacccctcccccaaattcacagctgagataaataattcagaggtaaaataaatgtccagcccccaccccagctctgtgtaattacctccctggtgtgtgttggcttcgcccttatgggaaatgtgagaagggaaacgggtccttttagcctgtgaatggtgctttattattttgatgcatgaatgcagaaggaataagagacaaaataaagttaataatacattgcagtgtagataattcatcacttaaatcaataggaactgcaggtcactgaactggaactggtgttactgtgatccaaacatggaattaataattgaaactacactgatctgtcttcctggaatgggaagacagacaaccccagggatagatgcacacagcacaggaggaacaaggcaatagagatagacagatgattcatttaattcctgcagctgtcacatacagtaaatatgaaaatctgctttctatctggaatcagcttcatttgggagcgaggctagttgaattatactctcagctctgtgtttatttttttcatttattgcaggaattttaaatgatggttagcatggaatgctatgttctctgaggttgaaaaggctctctagcaacaactaggcagtggtatgcatagcatctgtggccccattagctcttacacacccacctgaaaattgtgggtactcagtctcccaggaagtttggctctgcagccacattgagaacgattgaatcagtgacctgtagtttgcaaaagagtgtatcagaagagtcaagaaagtggactcagggagctcccaagtggaacaaccttgggcaagttacatagtctctctgagcctcagtttccctccctataaaagtaggtaatgacagcacctacctcataagagtgcttgagggctgagtgagatcatgaatgaaagcactgagaatcacagctggctcctggtatccagcggtgcctgcattactctcagaggtcatggagctactgggccagggtaagggtgaagttggtggtttatggagagagatttagtgttgtttaaaatcgacactccctgctttggcttttacagggatagagttgatcgtagaagttaatctctgtactgctcccttcctcttgcaggagatgggtgggagtgagatcaggacgcccacccgtagctctggatgcatggcaaaagtagtaactccatttggaggtagggattgggcacagttaaattgttctgcctaatgaaacggaaggaggtggagtgaggaacaggtttctagaggacttctggggagggaagcaaaggggaaaatccagggaagaatgtaagaaacagaatcctacagaaaaaagtggctgaatttttttagaacaaagatgcttaaaatttatttttaaatctccttccttctatacaaccttcacgtgagcctgcatcctgtgggtgtgtgcctgtgtgtcagtgtgggtgtctgtgtaggtatatagatacgtgcccatgtgtggctgtgtctgtgcagatgtctctgtgtaggggtgtctatgtggatgtctgtgtgtgtgggggggtgtctgtatgttcacaaatgaaggaaaaggggttggatttcctggctggactgacatggtccagaacaggacagcatacgtgagactggccctgatgatgtatgcactgatggatttcagcagaagtaggatttcagaagcagagttcactaggaaaagccccagtccttgccctaccacatgctctggagagcccggtggctgcagggcttcctgggcaggtgaggtgagtcttgcgtccactttacttgctcctccacctccacctgtgtaggctgtggagggactggctggggacatcatctgccaggtataggaaggcaccatgtccaggaagtccctttctacattcagctgcatttttgctcagtaggggggtctgtgtgccccttgtggtaacttttctacctgcctggagcaccagtctgaggatgctgtggttatgtgtggtcgatcttgggagcgagaatggtgatagaccagcccctgagcttagggaggaagtccagcaaatgaacagggtttctagaaggaccacttgcagtcctttccccattctccggggtgtgctaatatgtggaaggccagggccacctcctctggggatttcctgaaccccctgcagcagttgggatcagatgcatgggagttagacagtcagggtattttggaggagaggttggcatggctgagagccttttcggcagaggacctggggcagagttggtgggtgacagcccctccctaaagagagaagtgaccacattctgaactggtgtctttaaagggccacccctcctcttctctcaagatgattccagagcccaaaagcctcttctaagaggaaaagttctacggatcttagaacttttggaaggaatacagtagtctattaaatgcaggcctttggatctaaagccacagtgatatgaaaatctgtgcagtcaaatgtacccttgaaaaccccttcagtcacccttaaatctctagaaactggtctcttcaaaattcagaagccaaacaggaacttactttttaaaagtctgttttcttttgggatctggcctttcctggagtggtagaggccacaatctagtttgaactggaaagataatggggtcaacaaagaatgtttatcttcttgctgagcaatatagttgagtttcatgagtcagatgcccttagtgatgtgacttcagtagagtgtgaagcaggagaaggcagtgaaccaagaggcaagagaacttactgggtggtccaacaacgctgcaaagtagttgtgtgaccttgaacaagacgctgcacctctctggatataatttttcaaacttcagaacaaactctgaaaatatttagatgggtaggtagataggtaggtggagagagagagagatgccagcttcttaagaaatgtgtaatttagtgttccaaacaacacgagaatgagatgatttcataattatggttttctagttacccgtatttttcatgagagctccattagcaaggaatccaacttttcccccttgacattgttgaattgcattataaatgtccagaatttatatacaaagtgttaagcatatcccatttcaggattgaaattagctaatatttaagacgtcttccttgtcaattaagaacaattcttcctaacagtgaggtaggcatggtgtgagtcctgattagtggttgctcagggctaggtaggaggaagagggtataggagtttgtggctaagggatatggggcttctttttgaagtaatgaaaactgtctaatattgacgacagtgatggttgcacacatctgtgtatatactaaaaccactgaattctgtcctttaaatggatgaattacaagccgtgtaaattttatctcaataaggcagtttaaaatttttcagtgaaggccaggcatggtggctcacgcctataatcctagcactttggaggctgaggcaggtgaatcacctgagatcggagttcaagaccagcctggccaacatggcaaaaccccgtctcaactaaaaatagaaaaatgagctgggtgtggcagtgagcacctgtaatcccagctactcaggaggctgaggtaggagaatcgcttgaacccgggaggcagaggttgcagtgagccgagatagcaccactgcactccagcctgggcaaaaagagtgaaactctgtctccaaaataataataataataattaaaattttcaatgaaaaagagggaaaaaaagttatttctagatggttttgcttctgtgcatgggtcagaagccagcagttagaaaactgtagttatattcatggctgtcatggaaacaaggcatgggggactggtctttgtcccattattgcctttgggctcttcaaggacaagctggagcttaacatactgaagttggaaagaatttcagaggtcatctaaggaaagactgtgccagctactctcagcattttgcttagccaaacacttcatctctgcttttaccaggaacttacacctaaagaggaaaagaatccatgtgggggatatctgtggcacggcctggggggacggaaggactggggaaagaatgcatttgacctgcgaacagaaggagagagtagagtgacaacagctgccttgaagtgtggatgaaatgttacatgcttctcacacccaatgtgaggcaacaagcaaactctgagttaaaacaggcaaagacaggtatgagtctagagaagacagcaagaggaaggaaggaaaggaatctgacaggcatggaaccttcatcaggatttcattccacactgagtgcttcccagtggccatctcgtgtcatccctgcctcggccctacctcaaaggtaatatgccattttcacagataagaaaaccaaggctcagaggtgtgatgtaacttttcagagccactcagttgacaagtggggaaactgagattcaagcataagatctagggagtcctcaccaaggtggccctaaagcaatcctaggaaaagggtccgccataatccacccagttgctccagccaaaaacctaagactctttcttttctgatttctctcttcacacacacacacacacacacacacacacacacacacacatgttgtcctgcagctagccatcaacaagccaggttgaatctaactccttacctgatccctcaaggtcgtgcttctacctggcttcacctaccctgcccaacctcatcctgcaccattctctgcctggtgcttcctctttccccagtccactgggaggacaactgtgcttgctctgcctctgcctctgcctggatgcctctccaggtcttctcactggagccctccccttcaggtctcagctcaagagtcatcacctccccagagggaccttcctcgcagccctgtgtaatatggcctcctccaaatacttcccatcaccatgactacataacaacttttttacagaaattattttttgcagtttatctacatgtagtcttatgtgttccctatttccctaactataacctaagtccattgaactctctcgctccccgaggtagcctcagaacctagaaggtagccctggagcctaaaaggtggtagctccagagccttgctcatggaatatgctcaagggagggagggtgagagagaaggtggaaaggttttccctcagaagaaagagaatcaaagcagacatttctatggagcagagggctctgggatgctctggttttcggcttacttgctgtggacatctgcacatctttcttatgcatttgtctctacagatatttattgaatgttttttattaaaaacaaaatccacttctcaatgattgaagacagatatcctgggactcaggaaatatgtatgctaaagtttacatttgaccatgaggtgcagttatgaagtctgtttcgggattgggagtgggaaggggcagatcaactaggaaaagaaaaaaatcagatgtatttcagtttatactaggtacaaccatgtagaaagacagcgaaatgaaggaaatgattcctgcaatggggtacagtggaacctctggtccctgcatggtgcagtggaagctcccaccacctggccatgttgtcctcagactagatccacccaacctctcacatgtgtaatgcaggcataaagcatgaaaaccacgtgtccacagttgggacaactggtctgtcacagtgatctcaggtgattcatgcatggtgacgctgaagatgatgataatagggcaatggtcactagatggtgcacacttgaaatatgctaatagcgtactttccttgcatacatctcatttagcctcatttgtacaatttctccacacacatacactccacaagatgggaaacttgccttctttactatgaatcaccaacatctagagtaacatctggcctgtggatgatgtttaggaatgaattgttgggcagatggataaagaagatgggtccaccagcatgcaagctcttcatggaggggacttgtctgatttaccaccacaaagctgatgcctgcaaaatgcctggcataaaataagtcctccataaatatttgctgaataaatgactctccatttcacagataaagaaactgaggtccaaagatattacataccctgcccaaggtaacatagccaggaagtgatgaaatggtgatgatctgggctctttatagtaagaaaaagaggatctttctggtttcagggtgggagtaggaaactacatagaatagggcaggggcaggagtgagtttgagataccccacaacaaatgccataacttgctatgacagctgtaagcaatataatctgtggccataaaacagcccagtgctggactcctgcacaaatctgccttggaactgtcatacactgttttagttcagaggagctgtttgttttttgttttgtctttgttttttttttttttttatttgagacagagtttcacttttgtcgcccaggctggagtgcagtggcgctatctcagctcactgcaacctccgcctgcggggttcaagcaattatcttgccccagcctcccgcgtagctgggactacaggcatgtgccaccacgcttggctatttttgtatttttagtagagatggggtttcaccatgttggccaggctggtcttgaactcctgacttcaggtgatccgcctgcctcagcctcccaaagtgctaggattacaggtgtcagccaccacgcctggccttgtctttgctgttttttgtttgtttgtttgtttagacagagtctctctctgttgcccaggctggagtgcagtggcacgatctcagctcactgcaaactccgcctcctgggttcacactattctcctgcctcagcctcccgaatagctgggactacaggcgcctgccaccacacccggctaattttttgtattttcagtagagaaggggtttcaccgtgttagccaagatggtctcgatctcctgacctcatgatccaccggcctcggcctcccaaagtgctggcgttacaggcgggagccactgcgcccagccttgtctttgcttcttaaaggatgatgaggaagaaattagctaagcttgctgttaatgaatcttccatccccatgagaatgttagttttgagagccccaaagtgaacctgagccaagtgttcccttcccgctctccaggagctggggctgctataggggaagaaagcaagttcatggaaactgcacctgtcaccaacaaattcaaggtgtctcgttcccatttatcaagctgtcagctcctaacctgtcagaaaaccatctagatgtgtttatcagccagattgagcggagcagccccatccggttgcttttcttgttgatagctttatggctgttttcaggatgacctgcaagggagggattctcttcctgctgctctttccctcaacaggagaaaaacaaaaacaaagtcctgcaatttggggtaatgtagatgtcaacaacagaaccgcctgtggccaaggattgcacaggttagctttgtctattttcgtccagttaaacgctgactcccgggcagtaggcagctcaaagtacaacatgtcaactgaggagaaaattaaagccaaaaacctctgcataatttattcatcacaacctaaaattgactccctgcttgtctgcattcaggttgaggctcatttaactgcctccactgtgtctgtttaaagagaaaatagaggaattggctcagtggggtaagataaaccaaacacaaaaacgcccaacagttctttcattttactcctcacgtgactttgttcctctctgctggttaagatgagaatgactctacatcaaaatgattaattattattattacttcaagtttggtgtatcttgcgggggaaaaataatctggaattttttctgaacaaaactcctccagaccaagttggaggaaactgcacctatcaccaacaaataggctttgccctattcgtagactccacctgggtttccttctgcttctgaagtcatcagtgcacagtagacattgtcaacattttatagatgaagatcagagaggtacagtaacttactcaaggtcacacggctagaaagagtcagagctaagacagacctaagtctgtctgagtcaaagcctttaaattttcctgagtttcatgtagatcatgctcagtagggcaaagacctacagaggtgtgtagccaagacagtgtgaagttaggagatgaatttggtaaacaagagaggatactcttagctttagaagaccagttttggttgacaggtgaggtgggaggcagattgctactggatgagcatgttaagttttatgtcatgtctccccagtgagattttaagctccttgaagacaggtgctttctaagggtatacacaagttcataggaggattccctttgtaatgaacccaacagggccagatacaaagacaccttccaaagttggcagcgagactgttgacaatgatggcagtgaagagtggtgtctgccaaggtgacaacagggatgggattcgtctctctgctgctgtccaagtgtgaagtctggagctcctatgcctgccatatttgggaagagaaggagcttgaattccagggtaacagggagaggcaatgagaagatttacacgttgtgttgggagacccaagaagagtaatgattaagcaagggcatgggaggagaggggggcgctaagcttgctgataaggatggtgctgagcagttgccttagccttgctgacccgggaaagcagagggggagatgactggagagaaggaatggcatatttaatgggaggggagagataaatcattcttaatctttatgttcagggaggagaatggtaaggaatcttaaaaacccactctcctttccaaggcctggggagagccatgaggaaggaatttgaatgcctgccagagcaggtgagcaaagcttgggaagagaatctggtgcaggcacgaaagtgctagcaggaggtacgagagtgtctgaaatctctactggagagtgcagacatcatcttttctgccagccttgcatggtgggaagtagagtgggaacccgaggctttattcttcctgcagatgaaggctgaccacaccagatattgtgattgtagagggacaggtgcaatgaaaggaatgaaaaatccctcaaagatttgagatgggccgggcgcggtggctcacgcctgtaatcccagcactttgggaggccgaggcgggcggatcacgaggtcaggagatcgagaccatcccggctaaaacggtgaaaccccgtctctactaaaaatacaaaaagattagccgggcgtagtggcgggcgcctgtagtcccagctacttgggaggctgaggcaggagaatggcgtgaacccgggaggcggagcttgcagtgagccgagatcccgccactgcactccagcctgggcgacagagcgagactccgtctcaaaaaaaaaaaaaaaaaaaagatttgagatggcagtgccagaggaatgcaaggcagcttagaaaaattatgacgcaagtgttatatatttactgtagagaagttacatgagacagagaagccaaaaaagaaaaataatttaaactcatgattgttcacctagaaataatcactagcaatattttggtgcaattttaccccagtgtgtgtctctcttatatacacatgcacacacacatttatagcattggattatactatatgtactctttggaaacctaccttctcactttaaaaatatatacagagcatttttccaaattcataaataacatcctttttaatggctattgttcttccattgtagtaggtgggccatgacaactagctcctacagttgggaaatttaggtggttttcaattttttccatcatccaaagtgctccagggaacatccttgtacatatatttttggggggctttgtcatattatttccttaggagtaaagctcttaaataaaaagttatgtgcacgttaagagcttttgaaatatattgccaaattgctcaactgaaagacattaccggtttatattccttccagaaatgcatgagagcacctgtctctttctgtcctcacgttcatgggggatcatcatttaacaaaatggtagatgctgttaaagttggagaggctggaaggaacaccatgacctaactctgacttgcatctctcttgcaactctccagacagaagaggagtaggcatgggggatatttagagtgcccagaaataggttttgcagaatcaagcaacattttggaggatgcatttaagatatgtgtgagggcagtgactaggagattctctcaccaccaggtgtaatatgtagactcaagaagaagcttttgtccccagagctgacattgtaaagacaaggagggcagtcccatggtagcataccaagaggcagcactgggatggatccctttagttctctttcagtctcatacctcctggtgccctgacccaggctgccccttcaattccaagcaaagtcccaaagctttgcctttctcttataaaaaatcatgctggcttctaaaattaaaaaaaaaaaaaaatccagcgaacctctcagactcttctaggcaaatgattgaacttcatctgggtcccatttgagaagagcaggcatataaaaatctacatacatggcacagataagatcgagagctcacctggggagacttacaagtgtttcacattcaaagcacatgtctctaatgctaatcagataactgtagagtttaattcttacatctggcacaaaactcttgcttttatgttgcctattttttcccggaaggtaataaaattcacaatcgtatctcataatcaatatagcatctcttcaggcacttctgcacattatgactgcctaagctttggcctgcttaggtaagagaaccacacgctgttgcttatttttccttgttgagatactcagctctgaggtcttgccatcttgtggcttagaaagcagatcttgtttctcccactaaacagggtaggatgaagtacagagagagagagcgtgcgctggcatgagttcacaattggagaggttgacacctcacagtacatcctaactgggattgttgagctatttacctagaaaccagaagcaccaactcagaatcaagtggaaagtttgccctcggagagacagtaaacttttaggtgtcattgctgataagcgatagagaagaattctgtctgtacttagggtaggtgcataatagcagtttgctacactggtatgtcaaagtgctgttggcatgaagttcattttggatgagcaaaagatacaccagaagagacccatgtgtgagtaggcagaactcatattttcctaaactaacttaatattggtcaaaatgcaatgaaaaccacaaagatgtattttggggctatatgggcaaagtaatttagtattttataactttctcaagttcatatttgagagtaacaagagcaaaggtcccatcaaagcctgaacgtttgctccttagctattatgatttcaaaacccatctttctgttttagatccacttaaagtgagtatctttccttgttgaagtgagcaaagtcgcctaaacaacatgtttatctctcaaatgctaggagaataggcttatatcttaagttctaaccattttttcttccaatagatatttataatcataggagttttctctttcatagtacagtaccctaaatgaaggagatcatttctaccctttgagagtgacccaggtgagctcaattgttctgagatgaacaaagtcccacatacagcatagactgtgctgagacaagcaaggtgcccagggtgcaccatttaaggaggccctctctctttcagggatgtgagtgcttccttagagatgtgccctgggtgagtctcagacacgtctccctagtcttggttctggtcctggttgtgacctgcagactgcttttggacacatcaaccatacctactatcttttagagccttcttcactggaaatgtattaagggccctagtgggcatcaggaaatgtattttgcaatgtgtgcagatgatacagagcaggcatgccttatggcaaaggggtccctttgcttatctccagagggttcacctactaacaactgagattgactgcaatttctttgatgctcatcctggcttatgttatatctttgcctcagttataacatttgggccgaaagattcaaaacaaattctattaggtgacccgaaggctgaaaggttgactgtgtttaactggattattttacattttctcagtttgtgctttatttatacgcagtaagtttcactcaatccacctgacttcttaccttttgtccagcttgaaaaatgaaatgagtttgggctttggcactatgtgtttcataggctcctaatctctctttgtatgttttgttggccaataatacgtaaaactatgccccaggctttcttgaagtgcatgtaaatatctgcctctctcttatctcccatggtagtaattcatccaggaaacttacttccaacaggttaggtattaaactctccctcacataaatccacattggatgtctctgatcaaattataattttcaaagtattccatcactatgtccagttaaatcgttcctaatattttcccatgactgggtgactttttaaaaaatcttgattgtgctacagaagtgttttcccaaatgctttattaagacttgcacaaatgctcaccatttatcagcaggaagtgtttgcctgcttggaggaaaatcaaactagtaaattattttattttatttgcttttatgtagccccctgcatttctgtccatttgggctgccttctttgagcttgctattataactagggacaactcctcgtggcctcataaatcataatcgttgatatttattgctcagtaggtcttttaaaatccagttggaggggttccctcctcccttaaaactctgccttttattttgcttaaggcactatggtaggaaactgaaacatattttcctggtttttacttaaactaaatgtaaggcaagccttatataaagccaacaaaagagagcctgaggtttgaagatgaaggtcagcctcttggtcattgattcgacaagttccaacctggcatttgcaagggtttgtctcgcagcaactgcctatcagacgcctatgatggtccagactctgaatcaggtacctaacacactgctagacaagcaaggcttagtctctgccctcgtagagttgacagtctaatccaggggtcactgatctttttctgtaacacagcagatagtaaatattttaggcttagaatagtccctgtcacaaccactcacctttgccttgtgtggtgaaagcagccatagacactctgtaaagaaatgagcatgaggttaggcacagtgcctcatgcctgtaatcccagcactttgggaggccaaggcaggcagaatgcttgaagtcaggagttcaagaccagcctggccaacgtggagaaaccttgtctctactaaaaatacaaaaatcagctgggtgtgatggtgcatgcctgtaatcccagctactcaggaggctgaggcaggagaattgcttgaacccaggagatggaggttgcagtaggccaggattgcaccattgcactccagcctggccaaacagtgagtgagactccatttcgaaaagaaaagaaataagcatgagtgactgcattccagtaaaactttatttacaaaaacagggagtgggatcagattggccccgtaggccatagttcgccaacccctcgccaaatgaaataaagaagcaaaaagcaaaagtaagtaagaaactaaatgtaataatgaccatgtatgatcattgccataaaagaaacaaatggggtgctgagatggacagtttcggggagacttgctttggatggagtgatggggaaggaacggctgctgtgaagagatgtgatttcagctgagccctgagggaggggagcaatcagcagtgtgaagagtgggaaggagaggattttaggcaatgagaaccacaggttcaaaggccccaaggagggaaagtgcttagtgagtctaagagctaaaaggcagccactgcgcccacctttcatccctcccagctttcttcatccatgaagtgggatgtgtgggagtgttggtctaccccagagtctggtcataagagcgccagctcaggctgccctggggggcctcagtgggactccagggtatggataatgacctttcctttggccaaccaggggagatgggggttgggctcactttttttttttcttttcttttctttcttctacttcttaagcaaagacctttcatcagcacacggaatatagaaagcttgctcggaatgtgtcaggctaagcaaaaacacatggtctggttatattctcctaaaatagagcaagagaaaggcgggaaacagaacagcctcccataaatcattatttgtctggggaaaaagtctctgacagatatgtggggtaccactgtgtgtgtgtgtatgtgtgtgtgtgtgtgtgtgtgtgttgtggggtggggggtgtggtttgatttccaaggcagaatttcactgtctgatcctgtctggagggcagaatgcttgtgctctccacatctggaagctgcatctccagtgtgaccagccacttgggagatgccctgagcctgtgggacattgaagcccactcccacccccacccatgggtacagaagctgcccagagatgctggtggaggcaggattccagcaggtagatcaccagggaatctagatggaatccatagttctgccctgcaagaatgctgcaattctgtaccgtggaggagccaacagaatcaccaggctctgtgactcagtcacaacaccctgacctgcccctgtccattctccatatcatacccagagtggtcttttcaaagcacagctttgaccaattctctgtctttcacacatacacacacacacacacacacacacacatgcgtgcatgcatgcctgaaatagtatagtattgctcttaagataaacattaaagttcctaccatggtacagaaaatatatgtagttaggccccgtggctctttcttttccagactcctcttacccttttctgcaaccacacagagctttttaccaattctactaacccatcctgctttctgcaccacagagcctttgcacatactattctctctgcacagaaggttctgttccctggtaccggttcaccttgttctcagatcaagcatctgccttcctcattaggtcaattttctctaaactcctataacactcacattttgtcttcaacgtacttattgctattatagttttatattatttgcttgtattattaatgttggttaatctttgattaatatgggctctcacctcccactctcaccctgctcatcagtcttggtgcaagaaacagcatagagtctgtctacagcttttagttttgttaattttattttcattttgttatgtttgttcatcagtgcactcagaccatgtctggtacatggctgaaataaaatacatgtcttttgaatgaatgagtggatgtgctggctatttcttcctgcagtgggcacctgtgtagtctttagtaattatgtcctgttacctaggggtttcctctctaccagggctttgatccagtcaaagacgcagtggtctctcactggatattttagcagtgaagggggaaaggggaggtaaggaatggccatgccttctgggaatgaagattttctgagctggaggggatgttagagattatccatggactcctcattacacaggtgaggagatggagctttttaaaggtcaatggctggttagattactagccatctttacagtccaaattgtcagttcttaggacacaggctcttgccaaaagccttgcttcctggcccctagcctcagtccaagatctttcctgagtacaatgcccccacttttattccttaagtaagattagtgttggcaaactaataaagctccagctttaggttctatgactgcaaaaccctgctggagccccagatagcttcctttcaccaatcataactcgggtttgtgttgctggccctgccttagaatcttagcattatctgggacactgaggaagcagccaccacttcctgtcattgagctgtcatccaacccaagaaggtaacttcggccagggtggtttcattttggactcacactaataagaacatgcctcctgtcatggaatgacatgaatgatcatggcactttggagtcaaataggcctgagtttgaatcccagctctgccacttaaatctgtgtgatcttaaacaatttactataatcctagagcctgagcttcctctgcatgtaaaggagatatgggattgtacctcgtttggttgttatgatgattaatgaaaccaatcacaccaaacacttagaacaattcctggcatatagtaggcatttaatacatagtttaaattctttcttttcaaaaactttgtaattcagagaagaggcatggctccttaacttctgccttctggattctatgcactcatctatgtgtgcatacattaaccagagaatcaccaagcaccgactattacctgccatgcagtacgccaggtaccataggtacagaggagaatgagtaagacatggcccctgccctcctacagtttaaatccaaaaggcaagacagtcatttgaccatgctacatagacaatatacaacagaatacctgagactctctggagccaccagccatgttatatggctaaaattcaggactctggagcctgcctgcccatgactgattcctggctctgcctcttactgctgtgcctccttgggcaagttaacctccctgagccttcgttcccttagcgctaaagtgaggatgatagtagttcctacctcacaggactgttagaagtgtccaggcacctcacagtgcctggcaccctgtgagaactcggtaaatgttggccattatcatctgggatggcacgaaatgccacagccagggtcctgaatgtctcaattcagcaaaggagaagcaactccaagctgactcccagcttgggagggaagacaaagagttggggcctgggagctacagaagaactgagcagctgtgtcctcaagctccagacgccctcttcccacgtcacttaggatggattcctggcccccacacctgaagttctgttctggagagaccacctactccaggcagcctggaggcggggcctgtgacaggtggtttctcataatgtgaacaactgacactgtgtttgctttttcttccacttatagatgctttatcctgcacagacgcagacaatgaggcacaatgggctctccagggtggttttcacgtgtgggatattttcttatacaggtttgatcacacagtcctgtcaacacagacagggcctttctttcccctgatgagctccatctggctttgaacacctgtcagaacctaggatgttattcttggaagagactttaagttctctatagcacaggcataccccctcacttacagatggataaactgaggcccagagtgagacataacttgcacaaagtcacaagttggcatcagagccaggattaaaacccaggctttgaagttctcagatatgtggtatttctaattcgccatttctacatgctatttccattactgtgtataaggcttaaggctgaaaagcaaccacattcttttcaaatctcagcccagattgactgactggagtcgtctgccaggaagggtggcatggccacattcagctcctgaaggaaagagctgtcatcgattagcaatgcctgccatgcataggagatgggggagccccctgtagcacacattcattacccttggccaggtggaagtaaaaggggtaccataccactcatggtggaggttcattcataagccatggataggaaggagatccaaggggttaggttagattatgtattgggagggagaaggatggagtttggagaaaagaatgtcggtacacatgacaccttcttccaccacagcacacacaaaccattgaattgccccttgcaggtgaccttctgatctcttcccgaaaccctcttctctctctagggggaaaagtcttcccaatctatatcaaagaactgtcatggattgtgtcaaagattgtggtagatgtgaaaggtggaagtgtcatatggtgattaagggcatagtctgtgcaggcagagagttctgggtttgaacaccaggttttcacttgatagttggcttacattatcatttaatctctttggggctcagctttctatctgtaaagtggggatgacaatacatctttcacaggtttctgtgaggattaagagagaatgcatataaaacctggaggacagtggctgacatataataaattctcaaaaaactggcagctggacatgaatatatctttaaaatacaaaatgccatgcagtttcctcaagcagttgaccattcataaactatccttccagttagatactgatgtgcatgtataatgaggtccttgaaaccctattcaccactaggaggttttctgaatccgtgatagctttaaaaaactttcagtgctaagtggattttcttacatcctaatcctttgaaatatatgatgagtaaatggtttatagggtcaccatatatggttaataagaatgcttcatttatcacactactctatccactcaatatactggagttatcttagtggcaggtatgaaggcaacaattcttaacagtccctcaaaaacatttcagaaagacatttgggtagtggagagagaaaatgaaatagtttgatgatgattcctatgttttaatatttggttaatgatgtttcattaaccaaactgggttgttttatagaacccccaccccaatgcatgagttgaacgactcgggactcagagtggttaagtgacttggataaggtcatgcggtgagtaagtagctgaagcagatctagcagcggtggcacctgtggccctcccgcccccaacacatacacagtggagggtgcaacagaatcaccggaggagcttgttaaaaacacacacccaggaccctgtcagcagaacctcttgtaggggtggggcctggaagctgtctgctttgaccagctccacaagtgattctgagacacaaccaggcttggcaaccattgctaggccctggctattcaaagcgggcctgggaaccagcagcatcagcgtcacctgagcttgccagaaatgcagggtcctgggcctcaccccagacctcctataccagaatctgcatgttcagaggatcccctgggggatgtatgtccaaagtgatgtctgagtcactttggtctacaagacacagaaacacgaagcctttcacagccagttccaaggtcaacacactaaaatgggctgaaggggctgggcacagtggctcttgcctgtaatgccagcactttggaagtccaaagcagaagatcacttgaggtcaggagttcaagaccaccctggccaacatagccagacccccacctctatttttttttttttttttgagacagacttttgctcttgttgcccaggctggagtgcagtggcaccatctcaggtcactgcaacctctgcctcccaggttccagcgattctcctgccgcagcctccagagtagctgggattataggcacccgccaccacgcccagctaatttttgtattttgagtagagacggggtttcaccatgttggtcaggctgctctcgaactcctgacctcaggtgatccacctgcctcggcctcccaaagtgctgggattacaggtgtgagccactgcctttttttttttaaagtggatgtggaggctgagattaataatgccttgaggtgaagagaatatgcagacctgggatgaggtaaaattaggccttgatcttgtgggtatctcagcagtatttcaaaatcttgctaccttctgattctttttgttgttgtttgttttgatggagtgtcactctgtcaccaggctggagtgcagtggcgctatctcggctcactgcaacctctgcctcctgggttcaagtgattcttctgcctcagcctcccaagcagctggactacaggcgcccgccaccacggccagctaatttttgtgtttttagtagagatggggtttcaccacgttggccaggctggtctctgtctcttgacctcctgatctgcccgccttggcctcccaatgtgctgggattacagatgtgagccaccatgcctggccccctctgtgattctttatgaatcagctggttgagccttctcattgtaggtaaaaggtaatttgattttttttaataaacctaaatatttcatcatatatactttgtgtcagtcttacttactattgcctacataaatgtagacagttttctccaagctgtccttttctcacatacggagaacatctttaccttaactttctagtactccgatttctcagagatgctactggccttttatgccctttagaataacgggctggttttgaagatgacttttgttctaatgttactttcaacattggatatatgtgaagtgggagatagacaacctttaccttcaagataaggtgggaaggaattgatttctctctgggaaagtttattgcttattttctagtttcacaagtgctatttgtctatattttcccctttaaaactcaaaatgagttttgcttgttgatggtggggctgcatccagagtttggattggaccagaccacccaatcactgcccttcattttgccgctatggacacagcccagatgcttgttggctggtctccatcttttagcactggaagaccatattcagcaggcatggcatccctgagcctgaagtcgtagctcctaatggagatactctggtgggggcaggaagggagattccatcacatgtcacaatgcaaaatttaaacagactcaccattagagatctcctccctgtgggtactctgtggggcctcatctccctccttggcctcaacacagtctttcaattcccagctcttagcctgggccttttggcagtgggcctaaggccattgtgctttctgggctcaacaaagacttggaagttggttccacagtgacaggtctcccaagcctgcccccttgcaggcaccagttcacctgccatcgggtgggtactggagtgtgtccaccagggccatggggtttgagctcattccttccccatggcttaggttcctagaccagcctaacccatagaagagactcagcaaacacctgcagcctgaacgagtgaacaggctgagcctgttggtggtgaggaaaagaggagaagcagagctgtggggagggagagtggggagcaattgagtcctaaccattaatattcgcaacctagagaaggcagccacacagtcccccttgggagagcctctagggagcactgctgtctaacctgcaaaaatagaaaaataattttcttttcaaaaatgccacactacccaattgatttgctaatgggttctggcagcctttgtattagtctaagcagccattcagaccaccattgacaatgtcaaacttataaattgctcttgttgaaatctgtacatcaaaattaaataggcaacacccggtaagctgggcctcacccccaccccacccccaccaccccccaacatcaggaaggccaggagtgcctctaggtggcctgggctgtgtagccagggaacaggccttcctccagaatgcccaaagacattctgaagtctctggaagaaaaggtcaaggaatgaggccggaacctggaaggctttggacgtaaggctaaatctgacacatagacacgtttcttaaagttttcaccattaaaactccagagctttcattttgcttgaaaactcagaagatctggccactgtgacctgcattctctcaaggcaacaatcagctagaactgtcctctttaaacaatctctttactcatcagtttaccaaacaattgctttcctgccagccacttccccctcctgccttacctgcctggccccaattagcctgagtttgagctccctcagtgctagggtcttaggctttggagacagaagaccttggcttcaaatgacgttggaaaggctacatcctttcttcacgtgttacttgtctcatctgtaaaatggaaatatttttgtaatcttgaagtactttgttgattaatggatagattatctccaggatcctgctttgcaggagctaaccagctttgagctgtgagccgggaatctgacaggtgttaggagtaagtgttcttcctttactctcggagagtcctagtgtttatgctccccaggccccacctaaaactaagccagtgtttctaacaaataattgctattcattatatatataattatatattaatgattataatagctaaccattttggagagcctcatatgtgccagatacagtcctctcacattgtgtccattatctgtgctcccctcctccagcccgatatcatttggggtaattattcccagtttgtcgctaagtggttagggttcaggagggtaagtaacctgcccaaggtcaaatactctgaagaagccagtgccaaagcattctgccccccttcttgcctccttcctcccgacgcttgatcatctagaataagaccattttccatgaactgttgggctctggagtgacacttgtttccccccagcagaaatgacacctttgaagtaaaatgtctcagttcccagctccacaggaaaagcctatttgggggcccattatgactgtattctagaagtcgtcaactcagatgcttaaatatagcatttcttcagtgctcagccgccggcagcagtgaaaacattttgaagggcaaataaatatttatgtatgagagctctttgtgcacagtaaatgtttgattctgttgccccaattccctgggccgagagtaaattatggagcccaaaagagagtgtgggtgagaatatgctttcagcgcctaccttcatccagcaaggctatatcaagcatctgccacggatgtgccaggcactgggctctgccaggcactgggctctgcagcagtggtaacaggctataaagtgcttctctgtgcctggagacctatacagtgctttgcaccaattatcttacttaattgccacagccttgtgagatagttatcattagcttcacgttacggaggagaaccagctgtgtgttcctatttctaagtgatctgttgtataaagacatgggccaagaatgtaatattctgacatattctccctttccccacgaaactgtaggctcattgaggagtaatggatgatcatagtagctaagatgctgttaagtccttcctgggtggtaggccctttactaagcacttcctatttctttgaatcctcacaacggcactgatgagatgggcatagtaaattgctcagaaatagctgctaagtcaatgcatgaaggtcgcactgatttgcttgcagccatgggcgtggaagaagcatccatttgggttatactgaccaagaatctctctccatgaccaaactctagtcaggatcctttgagtcctgttcccaactaggccttgactttgggactttcatgtataatttttgcaagaatcctactaagcctgtttagccggaatcctccacccttgatatctggtcaaggtcctcatcctccacaatcccccaggtgatgtctggtctccccgacccgtcctcagcaaaaaccttgttaggtggctttagccagaacccccttcacccctgatgtgtgttcttggtcattttccatctgctgacgccctccctgctctttggctataaacccccacctgcccacactgtattcagagttgagcccaatctctctccccgactgcgaaacctcattgctgtggtcccacacccatcgcaatggtcctgaataaaagggtcatgaataacttttatctttaacaaggcctaatctctggaaaaagtacaagagcagacagcctccaattgggtcagcccattcatgggtttgtccactctctttgtttcctctcacttttccttttctcactacccttgccctttctttcttcttcatggtagttccttttgccttttgttctctccctctctgtcttttttttttttttttaaatccctttgccttctcccctcttttttttttttttttttttggcattttcccttcttctctgagattgtggggaaatgttggaggggacttctgagggtgacagggccgggtgcctggtgcagaatgcagccacttgggggaagtaataccagatgtgacgctggtgccaacaatcagcctgaaatgtaaacgtgagctgagctccagtaataaacctcttacagctggagcaccaggaatgccagaaaagaggaacgaggccttgcttcttaactcaggatggatcaaaatctggtctttgcatatatttatgcccacagcatcctattttgcgttttcagaaaggtgatccgtcttctcccaagtttattggaggcggttttccaacaccacttttaaaatattacaggcggccccatgatgcatggcttcgtttataacccacagcacttgcgatctttgggggaatatttctcattaaatctatttcctaactctttgtagctgcctcctacttccccaggaaactctagaagattcaagacaggcttgagcagccaggcgaggtggggatccagggcggtaagcatggatgctagggatgagggaagtcagagtgaccttcccactttgtttctctggggtggcaccatatatttcttacatccctaacagccctgtgcatcaaagaccttaaatcatgggtgtctttactctgcatctttctttggcagaggtctctcttcatgagacagttttatagggatagacagagacaggaacagatgagccttggcctggatcaggctttggtcagcaggaacctccttattatgaagagggttcccttctagaaggagtagggcaggagctcatttcttggattttcccatcaaatgctgcaactccttcctattgtcaaaagcaacatttttcttactaataaaaattgtttatagctgggaatcagttgttgctgtaaccagtgttgacattaagtcactatgccttaaatactaggccaagtatttgtaagggtttcacaagaaccttcgtgctttgaccatttgaaagaaaacactggtgctagtctcttgcagaatgctggcagaaaaacatagcctgaacccacctcccccacccagtggctgtccttgcctgatcttctacctggggccaatttttctccttgtgactgttatctcctgagataaagggacagaaccttatgtataatattccctttccctgccccccatggcttagatgtgctgtatgctgaatctataagatgcactataactcactgaaattaaatagatttgatgggttttgttttgtttcgtgttttgagacagtcttgctctgtcgcccaggctggagtgcagtggtgcaatcttggctcactgcaacctccacctcccaggttcaagcaattctcctgcctcatcctcctgagtagccgggattacaggcagctgtcaccatgcctggctaattttcatatttttagtagagatgggatttcaccatgttgccaggctggtctccaactcctgacctcaagtaatccaccagccttggcctcccaaagtgctgggattacaggcatgagccactgtgcctggctcaggtttggtgtttgttttcatatttatatatcgaattgtgaaggctagtatgcaacttatggaatccgacactgtgctgagccatgagaggcagataaatcatttatatactgggcaattgcaactgccattttggtcagcgtatgtgcagggtgagtctgaggtaaaaacatgaatctgctcttcagacctactttcacatccttacgtggtaatgttttgaggcaggtatttttttgtaaaatgggttttccccctctttattatgttttgtaacagaagttcagcaaactatggcctgggaaactggcccctaggccaagtctggcccacagaatgtttctgtaaataaagttttatcgaaacagagttcattcatttggtactatcaatggctgcttttttcctagaaacagaattgagtggcaacagagactgtgtatgttgcccacaaaggctaaagtattgactggccttctaagaaaacgtttctcttcctctgctctatatattaacatgcacatatgactatgcagagcttgttttgttccactggggctcttataataaaataccatagactgggtgacttagaacttcagaaacttactcttcacagttctggaggttagaagtgtaagatcaaagctccagcggatttggtgtctgttgagggtgtttcctggatcatagaaggtgccttccagctacttcctcacatggaggaagggacaaggcagctctctggggtcccttttataagggcacaatttcattcatgagcattcctccctcatgacctaatcacctcccaaactccccacctctaaatagcatcacattagtgattaggcctctacagatgaatttgggcggggtggggtgggaaataaatatttagaccacagcagactgtatgtatattcaaagccatccaatgctgtattttttcagtggtttaaggaactttcaagggtaattttaactagctgtgacctcaccttacacactggtttctgaatctaaacctagaaaagattcatcttggccaggcatggtggctcacacctgtaatcccagcactttgggaggctgaggtgggtggatcacttgagtccaggactttgagaccatcctgagtaacatagtgagagcccatttctacaaaaaattagctgggtgtggtggcgtgtgtctgttgtcctagctactagggaggatgaggtgggagaatcacctgagcccaggaagttgaggctgcagtgagccgtaatctcgcgccatgcactctagcctgggcgacacagcgagcccctgcctcaaaaaaaacaagacaaaaaattcatttttactgttgtatatttgacagttgttctttgggtcttttgtctacatgggtcagctgtttttggccttgtgtatctagtcacagcacacacttttgaaagatctctgtaaggaatctttctctggaggataggctggctataataagagtgaaaccatctctgtgatacgttcccaggactgagatttcatggaaccacatgtgtatgacataccacagatatgaacttcatggagcccccagttgctttgaatttctcatggtctcattcctcctggactgtctgcaaagacgctgaacggtccccatgactgcaggattctctgtggcccatgctcagtgacacttactggaagggaagcttagcttaaccaaatccagtcaggtttgcctggagataagagcctcagaacacccgcaggtgaaactccgttcaccccacaggtcagcttgttcaggggtgagctgacctgactgttagagtccccagacacactcatgaaaaatacagatgctcatatgccccaggaagttctgatcctggagaggtggggtgggcataggcatctgtgtttttaacgacctctgcagaagagcctgaagggcagccaggtgtgggaactgctaagctagtccacactcctcccttcatagctcaggaagacacacccaaagttgactcagcagatgaccagaaaggaccaaatcccaggccctgacaattagtccccaccaatgatttccaaacccactttagcagagccctgcggtgctcacagatgtctttgacactatcctgggtaagagaataacccgggggcagccctaataacagagttctggccttcttcatggttaatcagaatccatgtatatgctttaaatattggggtcacattagactttgttcctagagcaagagctgctgagacaaacaactgctaatgggggaaaaaaatacaattgaaattctcagccctgcatcttgcagtgaaatcaatccaccaaagcttccttttcttaaaaatctccagaaagggaaaattccacaacttacacctgcctcagaaggacttgcaaagtgtctcccgacctcacaatcatttctctcaggtgctgagagggagtttctacctgcagcctcacatccatctgcagccccctcaggctccggctctgttctctgtatgcacctaaatcacatgacacctaaaccctgcctgttccaacggagcctcttccttcgctgagtctcctctgaacccaaaaatccacagcccccgtttgctgtgggggcttctgttgcccttctgttgccatgactattaatagtgggcaagcacccactgtgtgccaggcagtgcatcaggccccggacaaggcaggggtgttgctggggtggcgcgtcaggtccggcagagaagggaaagtgtggcacacagtcattcactgcccttcctgtgggtggcagttttcaggataataataaaaacaacttggccaggcatggtggctcaggcctgtaatcccagcactttgggaggctgaggtgggcggatcacttgaggtcaggagtttgagaccagcctggccaacatggcgagacccccatctctactaaaaatacaaaaattagccgggtgtggtggtgcatgcctgtcatcccagcttctcaggaggctgaggcaggagagttttgaacccaggagacagaggttgcagtgagccaagatcgagattgtaccactgcactccagcctgagtgacatagcaagactccatctcaaaaaagaaaaaaacaaaacaacaacaacaaaaaaactacctttcaggctctccttccccattattgcccagccccagcccttgggtctgcatccagcctcaggccctgcatgtggggcacattcttccaggaggattccaccaagccagctcagtgtatgaagaaccaggcccccacttttcacactggcagccctggtgcctctgtcagccaggacccaggtggccctgcccctgacctgggcacagctgtggggcagaaatcctcaaggcccaccaccccagcctgttttttttcttcctatgcctcctttttgggccacagtcccatgcaacatctctgcactgccacctcctggccaaagagagcagtgagcaggggcctgggggagtggagtccaggcaccagggcggcagacggtggctctccctgcagctcccgagggacccagggaacatcccagagtgcagtctgcagagatgacacccacaggccagggaaaggtgatgggcagcatcagcccaaatgttcccccagaaaagtccccagcagaggcaagcatctgttttttctctcgttgcatttctctttcagccttttagtttatattgcccttggtttctgtttaaatgtttaaatacttgcatatttatgtgtgtgtgtgtaggatctaattccttttgtgcagtgtatgtttcttacttccatagacaatactgactttctcatgcagatcaaaacaaaggggacaccacaatatatagaaactagaaaatgctagtgtgagacataatagtaataataacaatacacccccatacattcaccatttaattgtgaaatcttttctctttgaaaaaaagactgagctaatttttagttccagaaacctgttctctatcatcagatggagctgataaaaggctttgcaaatggagaggtgttcgaaggggaggggagcagctgtgtgttccagtaggtcaagttgaagacaccctttctaaaccctggagtaactgagcaaagagtagggaaggggtgagaatgagggatgaaggctgggctagggggtgagcgtgtgtccggtgtcgaaagaccccaggcaggccgcagaggggattgtggacccacaagcccccagatgcctgtcctctgatgattcagggcctgtgcttgcaaatcagcccagaaacctgcagaagatgctggagccaggtggtccctgccatcaccaagcctctcccctggatgtcactgttgtgctgcgtgaacaaggctggggaacactatgggaccatgagaatccctccctaacagccgctgccccttggggcttggggaggcacagtaggaaaaggcagggcccaggctatctgcaggcatttgggaggttggggcccaatgtctccagcccaatgctgctgccccatggtagcatctgtgggtgatactaaggctctctggtcctgtaggtcctgcagcaggactgattctctattacaaagaggctggggaggctgagaggactggggtcaactgagtcccctcccttggtctctcaggcccttggataggttctcaaatcagcagccataagaaagagctaaagggtcaacgtgtatagtgattgcaagcacagacacaagtcccaatcccagcctcattgaaaaccagccaggtaaactcagggaaattgtttcatctcagagcctcactgctaccacctacatttgatgtgactcccccctagcattgtcgtaagaattaaataagaatacagcacataaaacttagtacatagagtgcggctattattgtaacaaggaatttagaaacagtacgcgagaaactttccaagttcatagcctgggaggaaaatcttgtttctaatccaatcatgacattaagcacaagcccaaagattagaacaaatcaagagatatttggcccaggcctagtggaaccactgccctctttctttgtacatggttttgggtttccctaagacgctggctgcctcttcacagagccacatatgcatgcgttttgttgcacgtgttgggaggaggaaacacccgagtttagccctaaagcagtcgggattgttttctctctctcagtgttgatatatttggaataactgaaagcagacctagaacatattaaaagtatagcatgtggagagggttccaggcggagacacagaacctctgtggagaggccaggccagaatgtgtgatcatctctcttgcctaagaccggatactgggccgggcgtggtggctcatgcctgtaatcccggcactttgggaggctgaggtaggcagatcataaggtcaggagttcaagacaagcctggccaacatggtgaaaccctgtctctactaaaaatacaaaaattagccaggcatggtggcacatgcctgtagtcccagctacttgggaagctgaggcaggagaatcacttgaacctgggaggtggaggttgcagtgagcattgcgccactgcacatcagcttgggtaacagagtgagactttgtctcaaaaaaaaaaaaatgtggataccaatcacgaagcttttgatcttcctttggttttcttttctggaatgcagttttgcatggtcagtcattaaagcaactccctgatatgttatcagtgtgatgtgactttgtggggcatgagctagcagggtcccattccctttccagaagttgagtgtcagtgttgccaatcttctgagctgaacaggtaccaccctggggcctctccttccctccttcctcttcctttcctcgggtgtcacaggtcagtcccagttggggtcctgatactcatctctatttcatcagcaacctgtggacaactggaggtacagacccttcacgaggttggcatgggtttattgaatggagccactgttcttacctcagagtaagttagggatacaactgagaggcccatttgatattaaagagccatcaagtcaccatacgaagtagcttaggggatggcaagcccacacttgctcacgactttcacccatagacaatggacaaactgggaggtggaaggtacccttttagttttgttatacagttgaattttctgtttttaggggacagttttggcatcttaactccatattcactgactcaacccatacttcctctttcaggtcattttttgggcctactaccccaaaagaggtgttatgtctttgctgtagggtaacagggacagcagaggcaagtatggcatgcttcggtgggggaaaggtaaattgaaaaatgagaagggaagcagtgcccaagcagctgcaaaattgttcaaaaccattttctcaactgggttaattgttcttccccatggtgcagagatacctacgccttcagaagtctgcatttctttattgcaaggagcagcctattaagagagacagattgtctaccaggagtggctgactctccacctctcttccctttgtctctctctcactcctctcctgctaacaccctgccccacaagacacagctatctgactctccccgccccattggtattagctttatcactgggaagggttgtcagcgataggaggggtgggcagactcaaaccagctctgcttgaagagtaagaataattacaaaatctcgggccgttatccaattactttgacatgtggccattctagggagttctaactggattaagttcattataaaaagattagtcctaggatggggactgtgcataacaaagtgaaccttcagaatgtgcgctgctgggccaccaaggactgtgggggtaaaaccgagtgaatggctttgtttattgaattactgcttagggattcgccaaggagttttgttcagatagagtttgtgacttaaagcaactgtcagcagtttcctgtttgttttccttttttcaacactattcttcaatgccattgtagttactgtcaaagcactaattcaaggtgtttgtccctaatgttctgtgtgagcatggaggtgagattattgatcaaaatggatctgagacacagggagctcatatattattcataaactgtgtatatgtgcacatatagagagagtgtgtgttcactcatataataccttgcacttgcataatgcttcctagctttacaaagcactttcatatttctcatttgacctacacagcaatgctttgggataaataggcattattatactgattttacagataatgaaactgagacttagagaagctaatctagagtcacccagctagattgtcccagaactgagattactactcagatttgctgttcttagcctagcatgaattcagtttacacatacattttaaacacaaagtacgttcagttcatggcagttgactatttggattcaccagctggttgagatcagttttctttctctattccctatgagaattgtatcagatatcagttttgaacaactaatttagttgctaagtacttttttctccttcttgaactcgggaaaattttacatgcagacaacaccatggagctgttctttggaagttatcccaaacccttcttctggtgtattcactacagtttgtcctactttaggaaaactgatcatcatttcatcttcctagaataagtgccccagctccttttaggatcctgggacatggatattggtgtcagtggaaagatgtaaattaccaatcaatcttttatattaataatttatcttagcaccttactttcttggacctcaaactccccctaggtgaactggtaagaattaaaactctaaactgataaatctgagctctaaatgtttgttaggatcagcagtgcctcagcttcctccccctagcccactgcaggcattgttaatggatcatcacacacttttctacttagcctaggcttggacttccacaaatctcaaaacaaatcgccaagcagccatcagcagtcagaaattggctagtaagatggtctctatttatcattctgatcctaggctctggtcaccccccacaaactccagaggccctgaaaggcaaaaccagaccagccaatgtctaatgccatctttatggcccatctggtgatcagcaattcaagataccaggaaaggccaaggggaatgtggaatgaataagtacatatattcgtaggatagttacagtaaagtttagggcagaagccagtttgctaaaacagagaggtttctgtgtaagcagaaatctagaatgctgtagactaatgattctgtctacccctcttccccagaaagaaatgtgcatagatacattttgtacaaatttttacttcttaaagaatatctagcttatagaacaaggttaaagacaatatctactgttgaagtatagtcgagattctcatttgcaaataatagaatgctaattcaaaatggcttttttaataaagaaaggaaacttgctcataaaactaaaaattcaaagagtccaggcaaggctggatctagtggctcaataatgtcattgagactgtttttacatggtggctcccagcattttcatttaccctcttcagcatggagtttggcagataaaggagcttctttttctaatagttcctgtaaaggttctggagcttattctcattggcccagcttggtcatgtgcccatccctgaacaagtcactgcttctgggggatgtactgttcagattggccaggcctgggtcatgtgacctccctggagactagcctggccccactcctccctttcatcccgaacagcaacactgaaaaagatgcagatgtggtggctggaggaaaggtgacagcctctcaattggctgcttgctatgtcccagacccagtgctgggtgctaaaaggagatgttacagacgggtccaaagcttaacagtctgtagacctctttcatgtaaataatcttatttgaccctgacaaacaccatgaggtaggtattttattatcatgattatacagaccaggaaagttatgttcagaggggctctgaaattctctcaaatagacctggtgcttaaccttcctttggtccaactccagattctgcaccctttcgatgagccttttatcatgatccgtgagaattttaaggtgcagagtttaatttcctccttcagttacctgaaagggcaagtcagagactggatttccatttctccacttgggaagaagtcttgaaccccaaatgtatgataaggagaattgtatcccctactgttcttcaatacttaggtacggtgcagaaataatatcagctataggtccttgaacatgtactatgtaccagacactgcactaagcactttacaaagaatgtcccatttcatactaaaaacaaccctatgaaatagtatgttttaccccgttagatgctgagaaaaggaggtgtgggaaggatgaaatgacctaacctagggagtatatagagccagagtttgaactcagctctgacttcgattctgctgttcttcctgccgagagatggatggccctaatatctttgatttcagccacagaccaattagaattcaataggacgctgggtagacaggagacaagaaagtcatcaatcccaaactttgtggaagccccccaaaaagtggaacaaaattaaattttagacaaattggtggtgatttaagagacctcaaaataaaataaggagaaacaaataagctacaggttacaacaggaatattgtctttcaaaggtttcaaaagttaaaattgactaggttttcattgtccaagtcctgtggcctggtttgcttttatccgagagccttgtgtttcccttgcttctataactcaggaatgacaacagtcctgggggatcctgagtggttgcatctggagaaacgggcatgccagccagagcttcacttaaacacagcacgcaccctcctcctggaaaccctgtcccttgccacatctggttgctgcagattggcattttcacattggttatgattttcagggtatacatctcatgacaacactggcagctttcaatttattaggcatattagcaaataaaactgtcccgaaaagcccagatttaatatctggaagattcatttcaggactgatttaatgcaacctgcatagtggtttatttcacatctccaagttgggactaaatcatccttgtcttgttgatacccataatacaatggttggtatttgcaaaatagaccaggctataaaagaatctgaagactctagttgctctaaatgttttttacttaaaaaaaaagataaagatactttataattttatgtgtctaggagatttagttttttttcttctttgctctcagcgatgtcatttaaatagaaataataggaagtatgttcagagatgtggttcttcttaactgttgatttgcagctatggggaatcaccttctttctctggaatcaccacactgcacaaagaactagtgacatctggcattcaatatgacaaactatagaagcaccatccagaaacaattcatcgtttcagtatacttgttcttaagccctgggctgctatcatactttttcaagatgaagacttgaacagagcaaacctgttattaccaaaccagctaatggcacttaccaagggctattaccctctgttagcatttatcacccgcatctcatttgacacttatcatttattgcctgacagttttatttatcttttcttttatcctccccgactgtattaccatctgctgaaagcctgggccctagagttagcccagttcaattcaatcccatctctgctacttactacctaggtaaccacagctgtagaacttaaccgctaatctcagttggctcatttttaaaacaggcataaaaataggataataggattaaattaagtaatatatacaaaatctttaacacagtgccaggcacgtggaaagtgttcaataacatgatagccactggcattaagattaagacaaggataataacactgatagcataaaatgtggtcttaaatgttgctttccatttcatgtaccaaagtcccttgcataaaagtagataatgtgcatctgtggaaagtcttgattatagagcatctatgaaaaagagccatttgtttgcattttaagattgtgtacatctgaaagtgaacttgtgacccatcgaggtgcttaaggaagcttattttataggagaactcttaaagttgctgaatgtgtttacaatgcttggtttttctagaaacttgtcttcctctatcttgtttgcattattaagttgcttagctaagccttcctttatagaatctacttagatcatcttaagcctttctgagttagcaaaaattccaaacttctgcagtgtaagttttgctgtatttgtgggatctattaagctcaccagacagcagttccagccagaattccttgtccagtatacatccgtgctcttccctattacgtgttataatgtagtgattcagaggcctgatgacgctggcttcctttggtaaaatgtgcccgagcccagcggtgatacctgaaggcccttcctcatcaatcatagcgctgacccacagcgcagctacgtaagttgcccagggggtttgtatttgacctggtgctgctttgtctgcattgggttcttttagtctgtgtttccggttcctcgcatgcttctcccaaggcgcccattcctttgctgcctacagggttttatgtacccggtgatgagatttttccatatcattgtcctgcagtggatctgtagctctatcatgccttccactgtgaacaagtatctctgccttccaaatcagggtatatctctatataatcattgtataggctgggcacagtggctcacacctgtaatcctagcactttgggaggctgaggtgggcagatcatgagatcaggagtttgagacctgcctggtcagcatggtgaaaccccgtctctactaaaaatacaaaaattagccaggcacggtggtgcacacctgtagtcccacctactagggaggctgaggcgggagaatcgcttgaacccgggaggaggaggttgcagtgagccgagatcaggccactgcactccagcctgggtgacagagtgagactccgtctcaaaaaaaataataataatcattgtgtagagaaaaggataaggcagaaggggaaggagattcaaaataaaatcactgtatctaaataccctgaatttatactcttaaaaatcacaatacccatgtatcagtatttgttctagaaaacaacagtatcatcattggccactgctgcaacagtacaatcaggcaaggatccatctgtcactttctcagtaccaggcaatatgctaggcactttctatatatttctttcctatttcctgtttaaatgccactttctctcacatactgatgtctgctattagaatcaaacattctctgtgaaagttagagatttatccatatcattaaaatctatccatagaatagcacctaaatgctggcaggatttttttggtggggatggatgcttatttgcctagtatttagccagaatatgttctttgcctcatattctgccatcatgggcaaaacacagcaaatgtatgtatcagaagaagttcactcttcctccaagtagtttactcccaactgtcagaaaattgttgtgatatattggtacgttagaacaagatttattgccgtattctgaggaaaaagtaatgtaataaatatacagatccgcagtatctaccatgtggatggagcccctggatttatgactgcattgtatacttgcattctggaagtcagaagttgcacctaaggtatttctgatcagaagctttagtgtgaatctgagggtttgctttgggaaaaaaaaaaaatgcataatgattataattgctatcgtttattagagtcttttctttgccacgtgctgtgctaggcaccattctttattctagtccttaaaaatatacaggatagctgtaagattcccattattcagaaaagaaaactgaggtgcatgaagagctatgtggctcacccgaagtcatgcagcgaatcagtgaccgacctgggatcctcacccaggtctgtgatccccgcctaccaccatcctagttgcttccaggttcacaggctcagagaatgccaggcctcccgttccgccgcacaaggccaatgccatctagatccaactcccccttaccccaaccccttatctgatctgcctagttgactggacctgctaggtgtatactcagtccatttcacctctgcccctctgccaccctcgaaggccaggctgccaccaccttttgcctggtctgctcccttctcagtgttctctcctcactcactcagtcttctcttcgttcaattcatttcccacagagtgaatgtctgtcttccaaaatgcatgttcgatccctcactctcctgctcacaacactttaatggttttaccttctcttagggtagaaacgataatgaaaatcctcccacatggccttatagggacctgggtgatttgaccccagcactcaccccttggcctctgtgctctgggtgcactgaccttctccctacccctccagtacgctggactccttcctactccaaggcttcatatgagcttttccccccaacttcacctggttgagtcctcaaccagcgaattcttccaatgccagctcaggtgtcacttccttcagaaagccttttctgattgcatccttgcccccatatacactgccttgtgtgataaactcactttgattgcactaagcccagctatagttaacaagctatttgtatagttgtttaatctctaagtacatcccccaaagtagaagctccaggacagcatggattatgcttaaatttttaccacagtagccccagttcctaggatgagacaagcacctagtaggtgctcaataagtatatattggttgataaaatgactgaatgattccagtgcccctcccttcactgaacgccaaccaccctgtatccattaagggtcagtgttagcatgtcacccagcctgggaacaggccagtacaggaagtcaccggatatggaaagctgccctgcttgttattccagcataatgtcagctgcttttatcattcattttctcccttctggggagattcgttctttctcagtggtgactgttgcttgggaggtctctcactggccgcttgctctaagaggaaaagctaccaggcgcggtggctcacgcctgtaatcccagcactttgggaggcctaggcgggtggatcacgaggtcaggagttcgagacaagactgaccaacatggtgaaaccccgtctctactaaaaatacaaaaattagctgtgcttggtggtgtgcgcatgtaatcccagctacttaggaggctgaggcaggagaatcacttgaacccaggaggcaaaggttgcagtgagccgagattgcaccactgaactccagccaggtgacagagagagactctgcctcaaaaagaagaaaaaccgtggcccaggaaggcatgtgaatgagctggtgcagcatttggtcttggcccagtggatgttgatttcctgtctacaagtcatgggacccaagtaccttaatgccatgaggcagctttggttagaatctctttgctctctttcactaatttcacatccacgtggttctccctaggctagcagccctaattttgtgggggaaactaattacaactatgggatttcagagctttcctttggtatgccaggttcgttgcattgtttgaaatttgctttcagcctgatgcattttttcagttgccagacaaatataaacagatttgcttctttaatgtttgccatcttggaaagaatattctttaaacaaaaatcagacacaaatacaaaggatgttgctcaaagaaaccgtaccacagttgtctgtgagcacagtgatgggattgctctgaatttctccagagccctaagagcttagaacagaatgtcatgatttgtgctgaagctttcttttcttcctgctcattgtaatcctatatatccctatttatgaaaacaccatgaaagctgaaatgcactcaaacttcccttttggccaggagttagaggcatgtgtagatccaacagagttttccacttaaaaggatcatttcatcagtgtggcgtcatgaccaaagaatggtcaatccattaatacttattgaggtgctatggtataattaacggaatgaatgaacacactgaaacaaagaatggaggctgcattccctgactttgaggaaggtactctctggttgtagagataagatggaatccagagctgaccacaataggaacaaatcatccctgcaggctgatgaagtcagggaaggcttcctggagggggtgtggccagaggccctcaatgcacagtgtagtggttcagactttaggaagtggagagagaaaatgaatcccaacttcaccacattttagagtgtgccctcagacaagttagttaccctctctgagtctcaacttctcatctgaaaaatgagggcaatacctctttaatagggttattattcttttttgttgttggtttttttttttgttttttttttttgagacggagtcttgctctgtcacccaggctggagtgcagtggtgcgatgtcggctccctacaacctccacctcccgggttcaaacaattctcctgcctcagcctcccaagtagctgggattacaggtgcacgccaccatgcctggctaatttttgtttttttttttttttttagtagagatggggtttcaccgtgttggccaggctggtctcaagctcctgaccttgtgatccgcccatctcggcctcccaaagtgctggaattacaggcgtgagccaccgcgcccagccttcttgtttcatttttgaagatatgtgaggtaacatgcataaagcatttaacataatgcctgacccacaataagtgttcaggaataggcagcaagtattgttgttgttctaattcccaaaatagaccctctcttgcctccagacctttgcagaagtgctcccctttcctacaacactcctccccagtctcaaaggctgcctttgctcttctttggggattgaacttgcatgtcagttctagtaggaaggctgctgtgatcctgtgtgctcccacagccgcgtgcctttcccatcatcttgtggtatcagcctgtctcttccaccagcctgacatccacagaaggcagacactgtaagattgtcctctgtttcttcccacaatacagtcaataattatcagtagaattaatggatgagtaaatgaattagcaatttctctcccatagttccaccccctgcagagaaaatgtgaatcattgactggatcatttaaagactggctatttaagtagaatctcaaccagcaaagaggaaagccagacttgggtggctcaaaatcatcaggctgttgagctctccagtctcttccctcaggaagatgcttcccataggttaattattcctttggggagttgatggcaggtgattactgctgtgccatctacgaggagcgttctccctctttggcaaatggatctctttagaggacaataaagctgaaatcctggtgggcttccgggaagcaggtggagcccatcactccctaaggaacatggcagtttgtgtatttgccacaactccagagccaccacggcctgttagagcagagtgcaggctctcagtcagaaagggaggaattgggcaagcagcaccagcttagtaccctgctcaagaagtattggttgaataataaatgaaggatgaactccttcttgcccctctgtattccacaggccactcagcccttcctagccaggctcctcctcttaaatcatctgttagcgcatcactcttgtgctgaagatcttcttttcctttattgcttattcaataaaaatccaaactctcccattggcctttgacgacctccagggtctcaaccaagattatccttgttttctctccaaccctttactcacatcaatgcttcggagctagagaccctagactcaagttctggctccagcacttactaaccacgcttttaggagaaggtacccagctctttggagcctcaatttcctcatacttaaaaagggaatcacagttcttacctcctctggctgttttttttgtttgtttgttttgagatggagtcttgttctgtcacccaggtggagtgcagtggtgccatcttagctcactgcaacctccgcctcccgggttcaagcaattcccctgtctcagccgcctgagtggctgggactacaggtgcataccaccatgccccactaatgttttgtattttagtagagatggggtttcaccatgttggctaggatggtctcgatctcctgagctcatgatccacccgccttggcctcccaaagtgccaggattacaggcttgagccaccgcgcccagcctcctctggctgttttaagaattagcagagatgctgatcagaaatccttagtgggctaaggtcttaaagtcctttctcatatgctaatgttattaaataccctcaccctcagccccatttccttatttcaccacccccctgcacatctctgccttgcatctttgttaatgctgtgttctcttcaatcccacaagcttctcttgatccattgatagtgaatattgttcacctctgtaagctggcaatgctttctctttccctggtatgcttgccagtattattcatgtggaaagctcagttacagtgtaagcttccgaagacaaggactgtatcttataatagtggctactgactgagctctttctatgggccagactaccacacaaggttatgcatgttgtgcgatgttcagctgtaggtggggcgatactcaaatcgtagcctaggctgctagtctttacatgcacagtgtggtttagatgtgtgcttaattctcacagaagccctacggggcaggcattcccgttttacagatgtggaaacaaactatgagggtaagaatttggccagggtttcacagctaggatatggagttgctgggatctgaccgcagtcctgtttccttcctaatccattggctgcccaccaggctgccccacggggtgtccctgggcagtcgcttatctatactatctacctttacatacgttgattggctggctgaggtgagtacactaggacttgactggaaaattttacaaaccaagaaagcaagggacttctgttcctcctacctcctagtctttctgtctcctagggaaagagaaaaattacaaagaagaaatctctgtgtgtgtgtagggtgtgtgtagtgtgtgtgtgtgtgtgtgtgtgtgtgtgtgtgtgtgtgtgtgtctttttcccctcttccctttcctctttttatctggtccagaagaatgatttgaaatatatagtgccttgtaccaaaaaaaaaaaaaaaacacaacaacaacaaaaaaactgtgtcaggaatgggtagggagttggcatttggggctgaattaggagaaatcgtccaaacaggtcctggctgcttaccagggagcacctggcatatggcagccacaatctctgcggtgggcagcctccatcttatgaagagcctgtggttcttagtgataaagcatggtcttaatccaaccatgtttgacaccaccatcccatctgggactttgtgatggctacagacttggcagagtcagggttcactacagagggagctaggattcccttccccacagttctgttactcagaagagtagagcgtcaaggagcattttctgaagtctgacttcagctcttgggtacgtgacacagacatctctagggagctactaaagtggttattgcaaaaggaacctccgggagtcaactcaggacagaatatcacgggcagttcttcctgtgcagtggtgtgtgctagtagacaccctcatcatacacctacttgctatgagtcactgtgttattcactgacacttacttagcacaatgtagggacagagctatgaaagctgggaggctgggcctgcagccgtgagattgcctgacccaccctccggcacccagcctaggtcctatcccctcatcgtatactcagtacacactttccctttccttctccaagagagctttgatcagatctctaaaattgtgacttgagatttttgcagagggagcaagtggagtaaaggtcactctcccccttcaaccttaggctcagtgacaccaggggccatgtctctcttttgctcacccctgaatccccagatactcccacagtgtcttgcacataaagatggacaataacatttgtatgacggatggatagaaagatcagtcagtcaactatttgttattccaactccctcatcttgcagattttggttttgtttgtcttgttttttctgaaaaggcaattgccaggtaaaaggtagtccatacataatataagataaaggggaaaatgaaattaaatgcgttctttctctttttcaagcacctttacagcaacttccctgacttccctagggagtttgatctatgcctttgtttacttcctcccaaatcatgggctataccaataagacaattagagagagtcccccgagttttccctgacagggaccaggagggtgttgggccgggctggctgtcagcaggttatcaggagagggggagacgaaggcagtggcattgccagacctgtgacgttccaggaggctttgcaggctctctgtggatttgcggtatttatcctctgaaataggatgtttcatcttcactgggtccaaaagcccacaggttattgtctaggaggcacatcactcatggcatgtggcaccaagaaagtggccaagggactcagtgtcctgggtggatcaggcctctcggggggctgctggtttgagagtttccagaaccggaccttagcttctcatgtgaactgagccacaggtgtcagctgccaagcgctctccaggcctatttctagacatgatggagaggggttccaggccacagacttccttcctaatcataataacagcagtactgtgctaagggtctgtattcattgagtacctattatgtgccagacactaaactcagccctctgcatgttttatctcttcagagcctccccacctacagtaggagcaattactatctctactgccccgatgaggaaactaaggctgggaggggtttacatcacttggtcaaagtcacacagctagaaatggcagactccggattggaaaccagattgcctgacttcagagcctcaaacagcaaaccattcagcatgcaaatgtgtctgcctatttttattgtttgcttgaatatacacctttttctctggcaagcttgtgtagagaaaattaacaagggtttactctcctcctcactgatagccctccttacagcgtatggctctccccactttccagccaaattttcttttggcaaaaatgcgggccatggggtgtcaaaggtaggagggataagaatcacttgaagacacttaaattcccagtcctcactccccgaggtgctgtttcacctagagaaatggccaggaatctgaactgtcacttctccccaggaatgcaggtgagacctccctggcctgtgtgacactgactaggacctcacctctgtctcatgggagtgacttatgctgcaagtccgtgggctcactgagtctcttctaagtctgccttccttaagctctgagtcctaagacactgagctcaaaggtagatgtggtccccgaggaaggacaccccacagaataaggcaggccagctggagcctgactttggggaaacacccgcctcctctgctgtggaggccggcccacgccatgtccccgtggcccatatgcattccatagcaccttctttcagctacagcccacgagccagtatgaactatttgcagtttcccattcatttcttttccccataggtgctaggttttactatctgctcatgtacaaatagacttctcaggtagacttcagataaataacctgccactcaacagagacagctatccctccagattagccaaggaaagttttaattccaagaagtctcatttccaattgtgcagaattgaccctctctttctgctcttctctggcccatgctggccttgattccagagcatccctgggtttgaattttgcctctacctctgtgtaattatgaacagcttttgctaggctggttaactgcactgtacctcagtttcctcatcagtaaaaggaaggtcatgatagcaactactcattggattgtcatggtgattaaatgatttaaatcacataaaataaaaagtttaacacagtattttgctcatgttaagtcctcagtaaatgttagctatctccattataacagcaacaataataactgttcttaatattattatggaacattaataatagcatttccacacttgggggtaaaatggtttatccgatggtttaaggtagagttgggaagcacttgctgttgtaaccctgagcaggtgacccaagctctactagccttggtttccccatctgtgaaatggacacaattagagtgcctaattcagggttgttgtgaggattgaacaggttcctaaaataatgcctaggaataagtatccaccaagtactggctattatattatcatcgttattacttaacatttttatgaataattattcattattgagtctgggccagtcatatataacctaatgggaagagtcttacgccaagaggcagaggcagactagcccagggactttcagcagaggtgcttggattatctcagcctgggttactttctctatccataaaattctgcccacttctcagcttccttccagaaatatcatgaaaatgggagaaataggtgtgaaagtgccttggctctaaaagtgctattttaagtaaagtagtacctacagtattaactacagccattcctgtttaaatgcttttttaaaaaatttcagtcctccaaaaaagactgtagaatgttaaacactggagatatgtttttaaaggtttttggtatttcctccttctagaaagacttgcacatacacaaagaggcaggcagtgacctattgagccacttttccaggcagaaggagggaaggtaggcagagacgacatacacggcagcctttgttgcctgacctgggacttggccccagacctggtccttgccagagatcctcaagggacacccgaggagtgtgaactctcacggtggttcttgtttaaacaactgtttttcaaataatgacagtcataattttagtgctatacagaagaacgttctaaaatttaatcattactcatttaatgcataatagagcaaaatataactagcatattaaaatctttatttttactggtatttccttcctaaattattttcttcttaaagcagtttttaacatatgagccaattttaaagggaagagtatttgtaaatacgacgcaaatcctgaaggtgaaaaaaactgcaaaaatttggaacatgccacattaaacaaagagtacctgttatttgtcaagcactctcctgggtactgggaaggtaacacttaataatgtatgatctctgacttgaaggtcttcatctgatgtgaggaatagctacatccacgctaacgggaatgcagtgggataggtgatgtgctggcagctcaaaaagggacaaactaagccagataaagcagagatccatcctgctagggcagctgagaaaagctgaagaaaggaaatgacatttgaactggctgttaaacatgtctcagttatccaattcatcataggcacccagtcctgcagtatgtaataatatttaatgtccctatgtcatggccctgacattcttgcaggcaaaatctcaatggtcaaggacatatgtgatgtaattgtgagttttgacaagctacatggtaagggcgggggccctgcgatgtagagcagctcagggagacagagacatgaacgggcatggtgagtgccaggaatggctgtatggctgattttaggaagaagcagtgggtgaagtctaagagcagattggatcccaggggtctccggtgttgaatgccacaccaggtaccttggacttttatctcttttttgattgtgataaaatgcaaataacataagatttactatcttaatcatctttaagtatgtaatttagtagtgtcaagtctattcacattgtcgtaccaccaatcttcagaacccttttcatcttgcaaaactgaacctctatgcccattaaacaaaaactccctatcccctcctacccccaaaccctggaaactactagtctctgtctctgtgaatttggctactctaggtactcatgtaagtggaatcatgcagtatttgtctttttatgactggctgatttcacttggcataacgttctcaaggttctacccatgttttagcatgggtccaaatttccttctgttttttaaggctgagtaatatctcattatatgtatataccaaatgtttatccattcatccatcagtggacacttgaattgcttccactttttagctgttgtgaataatgctgtttttggtatgcaaatatctcttcaagactctgcattcaatttaggggggtatatacataaaggtggaactgctggatcgtatggtaattctgttttttaatgttttgaagaaccaccattctgttttccaaagcaattgcactgtcttccattcctacccacagtgcataaagattttaatttctctgcatccttgacaacacttgttttttttttgatagtagccatcttaataggtgtgagttgatgtctcattgtgattgtgatttgtgtctccctagtgattaatgatgttgacaccttttcatacacttgttgaccatttgtatgtcttcttcgtagaaaagtctatccaagtcttcttcgtagaaaagtctatccaagtcctttacccattttttaatcatgttgttttgttgttgctgttgagtgggatttatcttttaagcaatgacaagctaaaaggtttttaagcggggctttaacacggttagatccagattgtagaaatataggtctgccggtaggaaagatgaattgactggtagaaacacaaagtagggctcccagggagttggctttgtgatggtccagctgagaaatagtgagagctggaactaaggcagtggtgatggttatctgaataattaataattactgtctactcactcccgaaaaactgcagtccctctaattgaagatatatgttctctcttagagaaatgagccccttctcaggacctcatacccacacctttccccacagttggatagacagacgcatccgtcctgctctgggaaccatagcttatagttttttggctatcctgaattccaagtcaccgctcccaagagaaaagcagtgttatcactgagaaccctgttggatgaaaacatgccctcagtagatcactttctgagtagtgcacacctttccccacagttggatagatagacacatccatcctgctctgggaaccatagcttgtagttttttggctatcctgaattccgaggcaccgctcccaagagaaaagcagtgttatcactgagaaccctgtggatgaaaacatgccttccgtagatcactttctgagtggtgagatgctgaaacaaacagtggagattccaggattctacctgactgggttcctgggctatcccttgtccgttgactctcatcagtttctcagcaaccggctgagctctgaaatgtgttgttttggtagttaggggactaatacctcacttgttactgcctttaaatataacaaacgacattctctttccttttattggaaaaagcaatggagcttagagttggcaaacctagagcacctcaccctcaggagctcagcttccatttctgtaaagtcaaggaaacaacacctccccctcttttttttttttttttaacagggcagagactacagattgccttactcaatatccactgtggcatctttctcatctaccttctggtcctgcagagatgggaatgctagaaatgacagtccccagactcctctgcatccagggctgtggttgtgattcagtatctgcctgtgatggcagaagactggaatagagaaatgagttaggtgggaagagagacctgccagggaaccctcttgctggtgcaagtcatggtgtcgctctggagctacagctctggatatagatttagaatctccacatggcagctcagatggtctaactccagatctggcagctggggtggctgcttcccacttccccagcttgtgcatagtagcagctcccttggtgcgtcagttctgcaatgctattcctgcaagttactcccagaggtgctcactggaacctgctccccgagcccattcaacaagtttgtcagcatgtacaagtttgtcttttgctacagaattgacagatgcttaccaaattgttggacttcctgcttaaactgtctataatggcttctgttacttgtagccaaacccagactggtttacagaatttaggaggttaacagaaaataacaagctaacactcctagcacagttcctggctcttagaaggtgctcgataaatattggttgactctgaaactgaaatcagggctgatttcatcttagtggaggaggcaactgcttaccttatgatgggatctcagggatgcgttctttctttctccgctctgctctgcagagtccacttacctgctcgttggtttcttgaagaaaacaactttgccaattagaaacaaggctcaaaactcaaatgcagctgggtgcggtggctcacgcctgtaatcctaatactttgagatgccaaagcgagcagattgcttgagctcagaagttcaagaccagcctgggcaacatggcaaaaccccatctctacaaaaagtacaaaaaaaattagtagggtgtggtggcatgtatctctaatcccagctacttgggattttgaggtgggaggattgcttgagcctgggagttcaagattgcagtgaactgtgattgtgctgctgcactccagcctgggtggcagaggcagagtgagctacacacacacacacacacacatacacacacacacacccttacacacccttaaatgttccttattaattatactggcttgcattgaactgaggtgtaagtggtcgatttggactcctttcctaaaagaagggtttgagaggggaggagtgagagagatggagggtactgggtcccaacccgcaggaaggagagaagcaggacatgggaagaggaagccaggcaaagactgggggctaggagtgccctggatcccaaaagtctgtgccccagaaacacatggtccagtccaggccgacacatgaccacttagctccatgtctatggctcctgtgagtggccaaaagtctgccaccatgactgaaatgacagagcagaagggtcagaggtgtgaagagagactggagaagcagacgggtcagatcatgcagggccttgtggacccgggtacagacttctatctagtccagtggttggcaaacccattctgtaaaggaccagatattattttaggctttgcaggccagacagtctctgtgaccctattccattctgctgttgtggtgcaaaagcagccgtagacaacatgtaaatgattgagcgtggctgtgttccggtaacctttatttcaggcagcaggctggatttggcccacaggccatagtttgccaatgcctggcttagtctaaggacactgagaagcctttaaaagatattggcaggacgtgatggctcatgcctgtaatcccagcactttgagaggctaagttgggtggatcacgaggtcaggagttcaagaccagcctgcccaacatggtgaaacccagtctgtagtaaaaatataaaaagttagctgggcatggtggcaggtgcctgtaatcccagctaactgagaggccgaggcaggagaattgcttgaacccaggaggcggaggttgcagtgagtcgagactgtgccactgcactccagcctgggcaacagagtgagactccatctcaaaaaaaaaaaaaaaaaagatatttaggaagggggttacctaatcatatttatgtttgtgaagagccctgtgacttaaggtggaaggtaattgtcaggaagcagagggatttgagtagcccagttgaagggatggtagcttgggggaggatgctgccagtggaggtgagaagtggactgaacagatatttgggagtagaaatgctagaatttggtggttggtcagatataaggattagggagggggagcttcaagactgacgcccagaactgtggctcgtaggatgttctggggcttagcttgctcaccctgctgtttatctgccatcctgtggtttgttaaactgtttcccccaaaacattctcaatcaaggcatttctcttcagtgtatggattcacctgtcattgccccagtcctaaaggttccgagctggaatgattcttgactctttatttcctacaagtcccctctgctcccatctagtcaagcacatgatctggtaactccgctactcaacctcttaatgaaagtatcctcactttccgtatctactcagttctaagttcagatgctaagactttcgctacatatgttcaggtattaagggaatcccaaaatgtttgtcgaaatcacttcagttcctgcatttaggatagtgagagttcacctagcatgcagcactcatagtttcatattcaacacaagcacctggccctagctgagccctctttgtcttaggcccagacctcttacctgtgtatttatctcccttatcatcagttgatacatcactgcctgatcaagcttcatgaagctctgttcctgtgtacctgctggaaaaacttctgatggttgcccattgcctccaaactgaagctccttgccctttccctggcactccagcatctgcagttgaagaccagctctgatctgtgccctttttctctctctcttccccttgcagactccttaatcttggtcagcctgttctcaaatgcatcatgcacgttcccacctctacggatttttacttgctatggttcccaccttccacttcttttttttttttttttttttgagacagagtctcgctctgttgcccaagctggagtgcagtggcacaatctcggctcactgcaagctccgcctcctgggttaacgccattctcctgcctcagcctcccgagtagctgggactacaggcacccgccaccatgcccggctaattttttgtatttttaagagagacagggtttcaccatgttcgccaggatggtctcgatctcctgacctcatgatccacctgcctcagcctcccaaagtgctgggattacaggtgtgagccaccgcacctggcctcacttcttgtgttctatacagaattgaaattaattatttgcagtttgaaaccttgctccttgacttactaacactgcagcatggggccagttacttctcagagcctcagtttgctcatctgtaaaatggagttcatttcattaaccttgcatggttggtatatggattaatatagaaaattcccataatgcatttaggatatggcaggtgttccataaatattgcttttcttcccctatacttcctaagagtgatttacataattaaatgagctcataattaaatgagcttagaccagtgtctcacatgtagtatgtgctcagtaaaggttagcctttttgttctaatttaatttgaagaaggatagcatttataaacaaagtgttctccttctccttgtcattccatcattatgataatcagttctgggtactcaaagatcaaggatgctccctgagcgggtgggaggaaagtaagcagcttggagccgggacaggagatgcagccggaggaaagaggaaggcattaaatgtgtacatttcccaaaatcaacatcacctaatttttaattttgctaatggctagtctttagttgagatgtcatgctgaaataactcttttaataaaagagaactaatgcgctcatttttccccttccttcctctatatcagcaaagacttggtgcaatgatgtatatcacccttttattttaattaagcatatagctttgagaggcttgtaaaaatgttgccaacagagaaatgctttaacagatgtgaacttgaggttggcttctcccatatatctttactacagaaaattgccctcttcattttgtacgtgaggtgaatggatgagcctgggtatgcgccttggagtggaagcgtgagagaagtaaagtattcaggaacatagagtgtgggattataagcatttttttagaaggctggggagaacagagcaaggaaaggagagctattttctgtgcaggatcatgtgtggagaagtgtcctgttggacagaagttttctatcattttcctttccacatgtcagatgacagatgatgtccaaataccgattttgaggggaaaaatcagggttttaaatccgagacccacaacttaaactccagcaatctgactccagagccagattaccaagaagctaaacctcttgacagctcaaggagcagagcaatgtgtcatgatagtaaggctgcaagcagttatcccgtaggatataaatgaaggaatgagcgatgtgtggtgggtatttatgcaatggcttttacctaatctatcagtgagtacagcatggaaaagcttaatgggtggtatttctgattcctgttttttaaaaaaaatagggagagagagacttggagtttaaataagctagaaaaagaaagaagcagagacagactgacagactgacttgtacaaaagagaacttaaaagtcaaaagagaagttcacccacgccaagagaagtaagcctgaaccagaagcagagagaagcagcagttctggaaccagggcagaagctgcctgaatgcgaacacacttgcttcacaccggctggaaagacgcattaaaactgaataaggaagtcggggagctgtagcccaacagcaggcatctgtattccttccgtgccgccgtgatggtctcgctggtgaataattcattctgagattatcctccctgcctctagttaagttgttgcccctgctctcagcaaaattagcccaggtgtgtgtggctattgtgattcctaacgtgtgaggcatcctggagaagggagttagccacccggtgaagtctgtagataaggggcctctgtacatgggggctgcccggaaggggttagaggctccagctcgctaaaaatcttgactcccaaaataaaaaccaggtgaatcaggtaagtgtgcatagcttacccagagacagggctgacttcctcattttgtagctatttattgtcctcttctagaattctgcccaagtgaggaccagatacccaaaaagcctttatatcccaaaaagaaggtcattgttgcagagagcctgatgtttcagcaatgcaaggtgctagagatcccttctagaaaaaaataaacactcacttccacgtagtagaaacccaaaacctcgcttgattttaacacctctaaataacttagtactatatctactgaatattgacattaactcttctcagaggaaggtactagaatagaagaaagcatattgaataatatcaaattgagtgtacatcaaaacctcgcatcaaagaagttcccttttttatgtgttctcactttttaatcaatgaaaaagtgacttgaaatgacaaatgtgtagaatccaaaacataatgttactattaggatcgaaaaagtaaagccttttggagtttaatctgaaaaagaaaagactaaagtgtaactttatctttgttagacaagggacatttcttaaagtttttataataattataaagttaatgttctttgttttttttttaaaaaaattacatattacctaattttacaatacaacagttcccatccacccccatattctcctatacagaggtagccattattaaaagcttaagtctctttccagagagtttctcagcagaatcaaatggaatcagattacaccccattttaaagtttactgttttgcttaacagtatatcatagttatgtctccatctcaaaacataattatttttcttataaactacatggtgtcctggtagctaagtgcactagaatttagtgtaacattaatggggcaatcattgatagagatttaaattgtttctagtactgctaatacaatgctgcaacaaacatcattttgtttgtatatatcctatgtttcttttttttttttttttgagatggagtctcgctgtgtcccccaggctggagtgcagtggcgcgatctcggctcactgcaacctccgcctcccgggttcacgccattctcttgcctcagcctctcgagtagctgggactacaggcacccgccaccacgcttggctagttttttgtacttttagtagacatggggtttcaccgtgtcagccaggatggtctcaatctcctgacctcgtgatccacccgcctcagcctcccaaagtatcctatgtgtattttgcacattactactagtatatctataggataaaatctccagaagtggaatgtctggggcaaagggcatgaacattttatgtataaataggtattgctaagtggttatatatggtgaggattttttgactttgaagaaggaagttggtatgtctgcagaaatttttaagaagaagtgaaacacataaattaaatccagagttctttgagctagacaaaaagtagaattttattatccacatataaccttgaatgtgtcactgaagctgtaatgtctcctttcctgaagaactttaagaagagcaatctcttatccaagccccaaatgctgcactgtctcattgatgcttagggaggccatagccacatgtccgtttatggatccaaaccactaagagctgaattcttccacctgagcataataaatggcaagtgcaaggaagttgtcagaaacacaaatcgggttcacaaacctcttataaaatgtcttctcaaaccctcaccttagtgcagccgttgacaaacaggctggggccctcagtgacaactgacataccaacttcccttatcaaagtattactagccccaggggccctttaaatttcattttatttttgttctgatgcaagtcagaacatcaggcagaaatgcatatatatgtaagatgaatgcagtgcgcagttgaaatttctcctgctatgagtctctccacaccttgaattttggactctcaagtcgtttttaaatgcagcttcatttttcttccctgtcattacctgatttcatctgaaaatctcagcatgtggttctcttttcccttaattcattagatttggcattgctgtttattatatcaacttgacatctgtctaatataacatctctgaagcaccaggatgttgggaaaaaaaaagggagagggagaagaggatttaactcttcagggctaactgaagactgtttaaatttatagaggtgactttagccctttgtagatcttcctctagatagaaatatatttgtaatcaaaatgataatccatactccctctttcttctgctgagatgaagggagagagacttgggggaaggctgagctatttattcacagattgttttaagtcagagttggtctgtcctgggagagaagattgtattagcttgataaagctaaccctttcagcctggggaaaaaagaatcacacaatactgctgcgaaggtttccttggcttctccaaagaggaattagattttaacgtgccaaaaccttccagattggagggtatgcttctagagataatatggacataaaagcaatactggctttgtgttttttgatgggaaataggaaacattacaacagactccaggttttagagagaaggctgacagggaaccccagaagcagggggaagggctgtggccatctttctttaatacagagtcttgtaaaaaattgttattactatctgcatcaagatgtgtcttgtttggagtactggttggaattcctcagcatggaatatcaataaaaaacaagggatttgactgagatttatgtcaggggaccagttctttccatgcctgtagtgccacacacagattcagaggtaggcaagaacacaagctggggctgagacacaatgcccaggaccacagcagagcaggaagggttcagagccgttaaaatccaactcgtaagtctcaaggtatagtaagactaggacttggctaggaattgctgttgattctggtctgggaaccaaagctcacctccacttgatcttaggtagggtattgatttctgattcttttcaagtctctcagattctaaacctgatgattattatgcaatgatgttgggtcgctgtctattcctagttactcatcatcccactagagggatagaaaaactcctatttagcaatcccttcatttatttccgtctcctttgtacctctgaagctgaacatattagtcatgttgtatgacaaggaattcccagctgttcagaaggagagagggagaaatgacagggagagacgccgctatcaataaaacaaagcaccgtgggtgaggtgtgcagcattttggtgttgtcagcaatctagccagccccgagtcaatctacctgtataaggcttccccagtggagctggaagaaaagttgcctggagaaagaaggagaaaaaaagaagaagaatctccttaagactgagaaatacattattttttaaattggcaatcctttttgatgagttaaatggaagcaagttgtgatctaaatcaatggaattgatagtgtttttatcttgaaaggttaactgtatttttgccactctcctaactcccaagcaacttggcttttaagaaaaaagaaataatcctctgggcaaggagcctgggatacacttaatttagggctgatgtttatgactggtcattgaccttgaaattccattagtgctaatgaaggacagtgctggatgcatccgggctgagtccagtaagtgacgtgcttggcgcctgcagggccccgcccctttgtctctgcacttggctgggacctgtcttctctgggtcctgatgcctcagcagcagctctgtcttgcagagcgaagcacctcccacagctgcaggttctcccaggccttccctccagaggagaggagaaagctctgttggattaagagtgtggtgcttgctctgtgtgtgtctcccttcctacagcaatgacattcagaggcagaatatgcagctggcattctaacattttccatctaaaaagagccttagagatcactcaaatgtgggctccacatatgcccatcacttagatttaacaattgtaaatattttgctatttgtgtggtggtggtggtggtgattttgccattttaaattacagacattgttatactttattcttaaatatttcagtatgccccaccaaaaagtaaaaatatgtctatgtaacaaacctgcacgttgtgcacatgtaccctagaacttaaagtatcataagaaaaagaaaaccataacactattatcatacctaacaaaatgaatattaattcctgagtgtcatcccatatacagtccatattacaagtccctcagttgtcctaaaaatgttttccaacaattggtttgtttaaactacaatctatacacagttcacatatgacatttacttgttaggcctctttttgtccaaaacgatgcggttccatacagcagcctctggacacatgtagctgatgagcagataaaatatggctagtccaaattaaggtatgctgtaagtataaaatgcaaagtggatttccaaaacagtattcaaaaaaaaaagaatgcataatatctcattaacaattttaaatagattatatgttgaaattatattttggatatgttcgcataataaaacattaaatatatttaaagttatagcttatatataagctgttttataacaactattaatgtattgggatagaaaagcaactttacaatagagggattggtaaatcttggcctgacaacagcgaaccaattcgtacgaggaacctctcgattggttcactgttgtcatgccgagattgatcaattgctctattgtaaagtcgcttgtctaccctcactagcagcaatcacccgtcactgataatttggcatcctaagaatcaaactttaacttcaaggttttagcattcattgatgactgttgcctgaatcagttatttaattagaggttgtaaaatgatttttccacacttcgtttaaatatattagtcagaattcatatgaaaagcaaagttcagaaacccagactatgtggttaccgtgaagtacagttactatgggaaagaccggataaaagctgaattctcccccttttaactatcaagtttcagaataaagaattggtaaaagctacctcttttgacagattacgtattgcctgctttcacatttagagtattattatgaactcatggatttttatatactaaatataaatagaatttttaaaatgtttgaattagtttctagcatttaaaaaaatcaagaaaaagaaatctggctagtgacagtaagcctacatttttaccccccaatgtcctctacagtggagtttgggctccatcctcagatggggcatgtgttcttttatgaacgaccctccccacccagacacaggattaggttgtctgccatgttcctgtgagtatgtgagtttgtagccccaagtccaatcacctatgtcataaattaggaaattacagtacagaaaagagaagcacagtacagaaaagagaagtacgctacggaaaagagtacagaagtatagtacagaaaagagaagggactggctgatggtggaatagcaaaacgagtggcagagttgggaatagaatccaaatgtcctacttcccaggaggaccagtggtctcatcctcagttaccaagagatgttcccagaaaagtccaggtaacggcagcagcagctagtggaaagtgcccatttagcatatgctctgcattttctgtgtgtagaagaaagcttattgctattgccaatgtggctctctctgaccatgatttaatcttccccaaaccctgggcagattcagaggctgcccacaacattagctctagttccgggccttcctctgggactatgatctacagagtcaatgtgaactactccaaataaataagattagtgcaacctaattaattcggagacccccttgggcaatatatttatcaaaaatttaagtgcacatagcctttttgaccaagcagtcccactgctaggaacttttctaaaactatattcacaaaatattccaagacatgtgtaccttgaagttcactgttctcatagaaaaccggaagcaaccttcaactgggtaccagttaataacttatggcacatctatatgaagaaagagtatgtggccatttaaaagagttaggtagagttacatgtgctgatactgtaagatacacagttaggtgagaaaaggaaaatgtagaacagtgtgtatattttttaattgtgcttattttaaataatacgtatatataccagtatatgcataaacatttttaagaaagatatataagaaaatattaacctctttagaggaagagaccagaggtcagagtgggggagaaagatatgggttttacttttcattttacgtctattttttgtttgtttgtttttgtttgtttgtttttttttttgagacggagttttactcttgttgcccaggctggagtacaatggtgccatctgggctcactgcaacctctgcctcccaggttcaagcgatctcctgcctcagcctcccgagtagatgggattacaggcgcctgccactgtagagacagggttttaccacgttggccaggctggtctcgaactcctgaccttacgtgatccacctgcctcggcctcccaaagtgctggtactacaggcatgagccactatgcccagccagattattttttaaatcatgggcatatattctttaatattaaatttatcaacaagtttgagtgtttgaataaatcagctgggttacggaaaagctaatggtacctttctttttaatctggtgttgtggtcacttaatatgagggcgttagtaatgcttctcaaaccaatggcagccagttgccttactaggcgcatctgttgaactccgtatgtattgattggtgcaaaactaattgcagtttttgccattagaaataatggcaaaccctaaccctgaccctaaccctttgccattggaagtaatggcaaaaactgcaattagttttgcaccaacctagtaagttctgagcacttagccaggtgcgatgggcagtacaggcaagtggtaaggagcttgcagtcaagttttggagaaaaggccaaaaataactcatcagtagcaggggtctggaattcaaggctgatggggacttctagactttcagtgcctcagaatacaaaagaaaatctatcaggaaaccagccagacagggtggaatacctaagccgaatgagctgtaacaagtgaatccaggctggatggcacaaaggggagggagagcagtgtgggagaaggatgaacaggaccagagcagtgggagagagaaggacaaagtaagggagccgtgcagaaagtttgaggatggtgatgtggggaggagatgggtttatagcccagcctggccacttgtggagggaccatgggcaaaccctagtttcttcataaaatgcataaaatacatcatagagacatagtaaagattcaagtgtataatgcatgatcagtgttcagtatgtttgtaatatacacccaaactttgctggctctatgtaagtatgtaggggaggaaacagtaagaatagaggcagctaatggcagagccctgagtcacatagtctagttccaattcttgactctactgctttctggctctgtgacatgaagcttccctgacctcctggatccttggttttcttttctggtaagttgggagaaggtgaaaaaactggtgcatgctatatacatttgacccttgaccgaaataggggttagggacaccaacctccctcctgcacagtagaaaatccacatataacttttgactatcccaaaacttaactattaaggcatccagttaacagtaggctcttaccaataacataaacagtcaattaacacatattttgtttgttgtatgtataatacactgtataaaatatgttaaaatactgtatttttacaataaagtaagctaggggaaaaatgttattaagaaaatcataagaaaaaataaatttaccgttggttaaatggaagtgggtcatcataaaaacctccgtcctcatcttcatgttgagtaggctgagcaggaggaagaagaggaggttagatttgctgtcttggggtggcagtggtggaagagaatccacatatgagtggaccagtgcagttcaagctcgtggtgttcagaggtcaagtatacttcatacatggcagtggattgttgtgtaagtgaaagtcaatgcaaaaaataaacgggagttcagcacaggcaacattttactcatgcagtgtaggtttcatgcagttttaaaacattattctatcaaatcctttctaagactctctaagataattgaggcaagagagagctacaacacatgagggaaaggtttctctaaaaccacacatgatgagactcagacttgaacctgaatttgctatgctctaaactgctggctttcccgctatgatcccgacatcttatatgccatctaatcgtaaaccttccttattccaaaatcttggactggaattatttagaagggtaactgaaggatggctaaatgatggcatttcatgctgccagaatgcatgtatgtattttcattatgctgacatgacttgtatgtggcgagccggtttcaagaaataacttcctaagctatgcatttaatttagatactgtgaaaccctgtttttaatcagagattcttcattaaaagcttattcactgggagccaatgaaaagtcatagaaagtacctttaaatccacaatgcagttgttctcttgtgtgtggtagtcacaccagcatttagagaccatgcagaaaggtcgggtggggtggggtgaacgctaataggatagctaccggcagctccaggaccccataaatcattcaaaatgtgtgcacgggagtttaacatacatatatctattatatgcacaataattattccttcacaagtgtttttaaataatcattttgtatttaattaacgtgcagtatttgtcttgggatgttgagggtaaggggcagagagaggagagttacaggcagagagaggaggctggcattcgtcaaacccatcaagaggctgcttgattttaaacgtagcttttctgcttttggtttcgtacctggtacagaacagcgggctgctctccccatttctaaggtctaatattttcatgagtgttttctttacaaaaaggcatgagggctgtgatttccatgccaatctcatgggatgggggctctagttgcccttctgaaggacacaaagcataaactgtgttttaaaagaggttctctttgcagaaggcattctgatcaagcatacagatatgtttgttattaccatctcactttgcaattgtgatgtttttttcttcttttttcttttttttttttttgagacagagtctcactctgtcgcccaggctggagtgcagtggtgccatctcggctcactgcaagctccgcctcccaggttcacgccattctcctgcctcagcctctggagtagctgggactacaggcgcctgccaccacacgcggctaattttttttgtaatttttagtagagacagggtttcaccgtgttcgccaggatggtctccatctcctgaccttgtgatccacccgcctcggcctcccaaagtgctgagattacaggcgtgagccaccacgcccggcggcaattgtgatggtttaatccatcattgatatatggccaaatatgtgtgtgtgtgcgagtgtgtaaatatacagatgcatgtaagtgattatgtaaatttgtatgtatgtgtttatggatgaaaatatttctttaaatgtctggagtgagctaatatagtagaaattgttcatttagacacttgagtcttaaagatgattgctctatgacaacagaaagagaaagttacattgagccttcagtttccatatcgtgtaaacacacagacttcactacatagctagcctgaatcagccagagaagtaaatactctaaagtgacccatcatcaaggggagaagacaattcttttaagaagcttgttttcagcccagatggtttggtcctgcccacaatcatttgatgatgtgctgctttcagctttggaatcacatacctctctgtgcatgtttcacaagaagagaaatgcagatttgtaacaaatttagtgaatgggtttaaagcaggttgtgcaaaaaggaaggtgggcttcttttgggagacagaaaggtttctctaaaatgtgatgtggctcagacttgaacctgaaaagtagagccaagtctaaagagataagtccggagatcttggctcaaaggacggtgaacttcaatcccttaaaacgtgctcaaacccagaccagaaacccaggtttgctgccaggaggagctgagtttggagactagcggagaggaaagcaggaggcatcgttttgttctttgtgtctctttcttcttataatgcctaaataaatcttcaggctctattctcaaaactccaggccagggattaccactcaaatgtcttcaagtaaagtcattgagtgaagtgggcaggcataataaaattatttctctacgataagaaaaataacaacgcaagctcaatgataaatggcagtggacacaggggccttagtgttaggaggcaacagggactcctgtgggcgatgctaaactggaaataagaattgcctgtaccttctacagagggcggctgccactaagctttgcgccatgggggagaggacctaaattgatggatatctggagtttgcaaaggaaaccaaaaatccagatagatgtttgtgtgaatttcctgattataaaatgttgactctgatttttttttaaagaatttgcaagccaaattaaacaccagtttccaacacatgctgtaagcaaaggaggaatccataaaaagtaggactatgcccaaaatatcagtactatgtgtgagagcagctcgggggtagcccttgctgtcctagctgctgtttattcacatacgcatgcaggcatgatagatgtgtgaccggaggacgcaggcctgtgggaatgacatgggtctgcatagacaagcctttgagttgttctatttggagaaaatgcaagaagcctggcgggtacctggtggttttcatgtcacctttcacagctgtaagggaggtcacacatccaagtaggggataggtaggcattatgagcatttttcaggaccctcttatgatggacttgtaaggtgtgcacctctctgtgagaaacatctgccattcctcctcaggtcttaccatgggaagcatttttagttgaaatagtagttgaacacctccatcgtttgtaatagatggtatagggtaataaaggttgcagtgaaccttattgtctagcctacttttcgtatgatttcaggataaaggagttctgtaatgaaccctgcttgctggtcctcagagttgctttcaagtgcaggtctttgccttgttcccttgcagtttgttaccctgattataggtgttccaaagtcccttgtcttaaaagcagggagaagtccctggagccacctcaggaacaatcaatccagagcactgcttcccttctcagtttagcagtgcagtccacgaaaggtctgggaattggagacactattaattcaggctcttcagtgtctcccgtcctctccaccgctcatccgtcttgacatcacaattcattcccacagggtgacatcatctctgctggaaacctgccctcactcttccgcagaccaaaccgtggactgcatggcattcagacagattaggagagggcaagggtatgagaaggtcaggacgacccaggtgactcgtctaccactgctaagcatctgccatagacactgtcccttccaaaatgtttgcaaggaatataatgcaaccatttaaaaagacgagtattcagaatgcaacagcatggaaaatgcttactgcaatatggaattatattttaatttattggaaaataggcattacattcaaatgattcaaaattcaaaagatataaaagggtataaaatgaaagtctccttgcctctcctgtgtacagccacccagtttgtgatgtttggtgaaaaaagaatatgaaatgaaaccccccacctctctctctctctctctctctctctctatatatatatatatatatatatatatatatatatacacgtataatatatatataaaatagatatagatagatctatatatatatgatatatatcatatatctatatgtatctatagatatagatatatgtatacttatatgtgtatgtgtgtaatgaaacctcgttctctatacacacatacatgtgtatgtataaacagataatttatccatagaagaaagactgaaagaaataagcaaaatatttacagtggttattttgaacagaaaaactacaggtaattgcttctacgcttcctgtgttttccaaaatgtgctatgctatatgtatttctttcaggaaataataaatgcatttctttatcatacatgtaatacacagtcattgaagtcactgaagcaagcttggacatgactagtcatcaaaaagaggaaaatggaagtcattcgttttatcacaaacccagaactcacgactgatggcacttaacatggtcacacactaccttcctggccttttctttgcagatacatgattatactttactacataagaaagaaaggccctctaactggggaggatctaggtacatttgcaaccaatcaaccagcaacgtggaagaggaaaaaggatagaaaggaattaggctcttatggtcagcctgtcagtgtgaggccttatggctgagactacccctccaagctgacccaaagctgtggctctgcaccgacacagggctaggtagggcagaaaggctgctgtcagccttgtggagcacagagacttaaaagactggtgagaaagtataaaaaaatcccagctgggcgcggtggttcatgcctgtaatccctacattttgggaggccaaggcgagtggattgcctgagctcaggaattcaagaccagcctgggcaatgcagtgaaaccctgtctccactaaaattcaaaacattagccgggcttggtggcgtgcacctgtagtcccagctactcgggaggctgaggcaggagaatcgcttgaacctgggaggtggaggttgcagtgacccgagatcacaccactgcactccagcctgggcagcagagtgagactccatctcaaataaataaattaattaaataaataaataaacaaaaaatcaatccctgccttgctcccaaggacaaagggcacttcaaaaatacaatcattccctgaatttcaactttcaaacacacacaacctataaacactttattattaaaatgatttaaaatgcagaaatatctagagttacaaagtacatgtttttggccagaaatttttcttttcctctatttcggaaaaaaatatatatatagaagattcccactaaaccctcttctcccaaggccacttatccacgtagaggtaacccctgtgacggtttgggatctcagcagaccttttctgatgcacttgcattcaaattcacagtcatgcacaaacacataatggatgcaggtattttaagaaaattaaactctctgttttttcgttctctgagctctaaatctcacttattttaaactcttttccagagcaataatgtttcccatgtatgaatcaccaaatgctaaatgtgcttttctcagcaaatgcaattcatttgagaatagctcccaataaattgcctgtgatgttcctttatcgctagagacaatgggcaacacaaaggcaaggaagggtcgcaccaaaccagtcattagttttaatttggtctggcagttttaatccttactgtatttttaagtataatagcatagtacggtatgttcagattttcttttcattcttctttcctttcttgaacattaaaatattgggcaaggtggggagaggaatgtgatctcttccttatgaaaaaacacaccacctaccctattttgcagactccatggaatgtggggtggaaattcgggcttgctgatgattagagttcaggacttgctgtttctacagctccagctgagtcctcaatagatcttcgtatctctttcgcgttcacctcctttaatgctttgcttcctggcactccagaatgattggtaatattaaatcagggagataccaccttcttctttccaaagtcaaaaagtctagacatcatctctgtgcccacgtgtgcctaaatatttccttctttctaaatgggtgatggtggaaaggcagggcaggcatgctaacccaggctcctccaaggaaacgctgtggttcagcaaggggtatacgagtttctggaggcagacagacatgtggaattccaataccacttttccctgtaccctagggaaagttgcctagtatttgagctgtagtgtctatatatgtaaaaccagaatagcagtacctgcttctgatgttttgaagttgagatgagcacactgtagatgtgttcacctctccgagtctgtgtacagacctgaaccatgactcctcatattttatagtcacacactactttccttgccttttctttgcagatacatgatcgtacttcactactgttgaataacttgccttctgattaacaaaatattaaggatatcttgataatgaaaaaacaattttcaaaagaagaaggctgcaccagcaagcatacaggtgttgacaaaaatagaaaggccctctgactggggaggatctaggtacatttgcacccaatcagccagcaacatggaggaggaaaaaggatagaaagggattatgctcttatggtgcttcatgggtgcacctctgttgatgagcagggtttggacatccccattttttttcttttttttggagatggagtctcgctctgtccccaggctggagtgcagtggcatgatctcagctcactgcatcctccgcctcccgggttcgagcaattcgcctgtctcagcctcccaagtagctgggactacaggtgcacgctgccacgcccagctaatttcttatttttatttttattttagtagagatggggttttactatgttgcccaggctggtctcaaactcctgagctcaggcaatctgcccgcctcagcctcccaaagcgctaggattacaggcgtgagccaccacacccagccggatatcaccatctttgtaaagaaggctgtgagtttgtaacattgagaaaaccccaggaatgtctagaactcctgtggcagcctggggcgtccttgtgctgctgaaactggcacaaactgccctcccccagagaccagaggcctgatccctcttgtttggggtttctctaattgcacacacatgtctatcagaaatgtatgatctccatagcagttcaccttcctgacgtcattcttgtccccagagctggaattagcattttgcagtgaagtctgggagttttttctatattcagaaagggacattgaaggctatgccaaaaggcttagaaacatactagcacatgataagtaaagatgaatgaggtattattattattattattattattattgttatttctaaagtaagattttctggattagccccacagaggagagtcagaggctttgatattttataactgcctctctgaggggagctgatttgttgctgtgaataccaaaagactgattatcaggactggagaattagtctatttggtttatttccccccattggaaccttctcaccagtcttctaccagaagcaaacttagcagaaaagtccaggagggaaacaaaggtttatttttttaatccagaatgtgtgatccccaagttggcatggtagtcagcaagtgcaggcgaacaaaactttgagtcttcattgtctccccctactcagcacatctctaagcttctgggagcggagtgagaatgaggagggcgctggacacaggggcaacagggcctcagtttcagttcccactttgccaagtgcctcacacaaggtatttacctcatgcctcagcctccacagtagtaaattgaaggggttggtaaggtccaaaatacatcaaagtgctctaagctactggggttcaacaaactcagttcccctgtcatcccacccagtgtccccacttcgatcagagaagcttcagtgtgatgatttctgtacatcaaggttttatggaaatgcccatttgacaaaacaattctacatttggttatttaataataattcaaaccagtgaacgaggtgctgggagggaccgccatgattctctgatctttatgaattgtagagggggatcatagtgggaggtcagggacaataacagagaggagaagaaaggaacaagatgggcaaggccctccaggagggccagagacaggcctttgtgttccagccatgcatgcacagcagaaggaccattcctgaagaccctgctgcccccgtccttcactccatgcccccacaggtgtcctctttttgcccgagcaggtagaacaaagagcaggcaagtcaggggtcatgccctggcttactgtgaccttggcatcatgctgcaaagcctcagccctctgatctagagaatgggatccagctctcacctcaaatgaaacacaggtgctgagaggtttataactcatcagaaaatgccaaaataactaaagccctgacagggaaaactgtgctggaacaggaaatttcagcttccagggacaccaggtttgcacccccaggaagcctggctgcttgtgaattccttgtcttttcatctccagccctatgtgtatgtggagactcacggcttatccctcactgcagagaactgaacgaggaagaggcatatggtgagagagtgccagtctgtggctttttaaatgaaaatttacatgtaaatatgaattagctgaaatatcagttattttttaattggctcttcaaatcagcacaaggaaaacctgtgcctgttggtctgctgattgagtgatgttggcttagagattctcatcaacagtcaatgaagaactacactctctcctgctggaaacccttccatggctccttctcgtcctcagatcatatccaaataagatcccatctgcccatcacctcctgtcctcctaatcagccgctattcccattctcattcactcagccactacccccattctcattcaacagcctcccctgcccatgctaaccacagtcaccttcatctgcttctcaaattcatgtatgtcatgtgctcagccacctcagaatcctcgtgcagtgtcccctctgcccagcaagctttacaccagtggattctcaaactttggtgctcataagcatcacatggaggggttatttaaagcacaggcagttgtgccccaaccccagagcttctgatttagaacagctgagattagatctgagcatttcccatttctaacaagttcccagatgatacaaatgctgctggtctagagaccatactttgagaacggctgcatcagtcccccactaacacacacccttcccttgcataattcctactcttccttcacttctcagtttaagctgtacttcctctgactgcttatcacgcattgagctctcctgttgtgcatattcccatcatacaaacatcttgtacttctttacagcacgtaacaaaagtataaacgcttatctgtacagttgttttcttacgtctatcttccctacaattctataagctttataaacaaagatctataatgttccccacctatgccttttgcctgacactgtgcctggcatacggtgtttaacaaatgttcgttaatatttggatgaatggacaggtacatggatctagaaagactatccatttcaggccaggcacagtggctcatgcctgtaaccccagcactttgggaggccaaggcgggcagatcatgaggtcaagagatcaagaccatactggccaaaatggtgaaatcccgtctctactaaaaatacaaaagttagctgggcatggtgatgcacacctatagtcccagctataaggcaggagaatcacttgaacctgggaggcagaggttgcagtgagccgagatcgcgccactgcactccaacctgggtgacagagtgagactccatctcaaagaatatccatttcaactatgggcagagcactaggaggactgtctattcaaatgtcacagggcatatggcaaagaggtagccaaggagagagggcacctgcctagttagccagatcagctgctccacccagacttccctcacgccctgccctctttatatacagcagagagacacacagggaggatcagagtgttccacacagtcaggacctgtgttcttgctttaggctatatgactttgggcgagtcctttttctttcggagcctcaattttctcatctgtaaaccaagatggttggatcttttagctctaaaatttgttgataattatgggttctgaaaaaaagatgcttcctttttaataggatcagtaatagttggggtgttggtcctcttccctaatcatggcaagatcatgtcagcaaaggaagtcaaactgggaggactgactgggttgttgggttgaggatggagattctttttattattatctgtataaacttatggggtagaagtgcaattttgttttgttttgttttgttttgttttgttttgagacggagtctcactctgtcacccaggctcgagtgcagtggtgtcatctcagctcactgcaagctccgccccccaggttcacgtcattctcccgcctcagcctcccgagtagctgggactacaggcgcccgccgccacgcctggctaattttgtttttgtgtttttagtagagacggggtttcaccatgttagccaggatggactatctcctgacctcgtgatccgcctgcctcggcctcccaaagttctgggattacagatgtgagccactgtgcctggcctgcaattttgttacatgcacacatcacagggtgatgaagtcagggcttttaggatatccgtcaccccagtaacgtacattgtacccgttaagtaatttctcatcatccagccaccttctacccctcacgcttctgaggctccattgtcattctcctctatgtccatgtgtacacattgtttagcttccacttctaagtgagaacctgtgaaatttgtccatgtctgacttgtttcacttacaataatgacctccagttccatccatgttgctgcaaaagacatgatttcattcgtttttatggctgaatagtattccattgtgtatatataccacattttctttacccaatcatccattaatggacacttaggttgattccatatctttactattgtgaatagtgctaagataaacatacaagtgcaattgtttttgttttgttttgttttgttttgttttgtttgagacagggtttcactcccatctcccaggctggagtgcaatggcacaatctaggctcactgcaacctccgcctcccaggttcaagcaattctcctacctccacctcttgtgtagctgggactacaggcacataccactatacccagctaagttttgtattttttgtagagatgagttttcaccacgttgccctgactggtctcaaattcctgagctcaggtgatctgcctacctcagcctcccaaagtgctgggattacaggcataagccactgtaccaggccataagtatctttttatataataatttcttttcttttgggtagatacccagtagtgggattgctggattgaatgggtagttctatttttagttctttgagaaatcaccatactgttttccatagaggttgtactaatttacattcccaccaaccacgtataagtgctcccttacctctgcatccttgccagcatctgttattttttgactttttagtaatagccattctaactggggtatgatatctcattgtggttttaatttgcattagtgatgttgagcagtttttaggtatatattctggccatttgtatgccttattttgcaaaatgtctattcacagagaatgaatattctcgcttctcttttcccggggcctctgtgtggagccaccattcctcaggaactgggagggggttagtggtgaaagggtgagagaccacagacacagcctcataggccagagcctcagggacatcacagagcacagaagtccaaggggtgcccacttcctgcttcctgtcatcttaggggcaatgttccatccaatggcctggctaaggtttcagaactcaagcgtttaaccaagattttaaatatatttgtgaaatattgcatgaaggccccaaagaaatttatactcttttctttctttttctttatggcaatcatcactgtagataacaactctgaacctacatggcaatgcttatagcttcattcattctgtctctgatttattggaagggatccacaacagtagtacaaatgcccagcatcatgtacttgtcatctttgctttttgtgggcttttttttaagaggcaggatctcgctctgtcacccaggctggagtgcagtggcatgatcacagctcattgtaacctcaaacgcctgggtttgagtgatcctcttgcttcagcctcccaagtagctgggactataggcatacaccaccatgcccggctattttttatttttcgtagtgatgggatttccctgtgttacctaagctagtcttgaacttctgacctcaagtgatcctcctgccttagccccccagaatgctgagattacaggtaagagccaccagatccagcccactttttatgtttttaggtttgcacctgtctagaagttctctttgttttctgttcttaagggaatacaattgtggttatctacagaaataaactgatgaataaatgatttagaaaagctgaaagagcaaaagggtaggagaagaaaagagaagccagaatttttactttcttgactcatttagagaaaatatgcttttagcctgacttttacaaaagagattaagaatacttttacccaaatgtttggatgttatggtaatagccttctcacataatgtcttttaaccttataccctgttttctttgggcttttgtcagggtggaggctgtttctcctttctgtgggtgtaccagggagctctggttgcatgttattaaaaagcaagctctaaggaccagaagaaagtgagggcgtttgcaggttcaatggtgtgagacttagaaaagttgataagaaggattagaattgaaggataaaaagactcttacaaagccaagccattataggccccattactttatatacattctccaaaaatcacatgaatgaagggaaagaaaggaagaaaaaaactggctacagttcagaacgtcaattatgtcctcttttaatccccttttcacgatttatttgacattttgaacagtggccaaaaaagctattataactataaaacatattcattggtataaatctcattcgttgaatgatttaattaaggtattgacatgcttaattgatatgctaagccaggaccatttttatatctcatttccatatgctttctgctttaagagaagagaggagctggatctttaaaaaaaaaaaaaaaaagtctccctccataaaaatgctatagattcatctgtgcctgacatcccgggggaccacttcctgccacttttcttgatttcgagccagccactcctctaagtggcgctgctcagagggaaggtgatgtatacccagcttgagtgcctgtcaggccctcttatgatcaataggagaatatttatattaataaagcaccaagttaattaaataaaatggtcctctgggtaaacttaagatactagaggatgggcaggaatcgatatattctgcaatttgaacattaagtatgtgccttgaaattttatggagcttttaaaaactcgctttgtaatgtaaaaagtttgaaaccacaagttttctctgccaaaaccttgtctctggcttctgagctgagggggactggaaggactggagctgctggagatgggagcttaggggaagccccagccgaccttcccctgttctggagctcccctctggctggatgcaaaggtgggggggtgtctcagaggacaaggctgggctgaagcacagagacctgagctcggtgcagggtccagggaggatggcacgtcctcatccccagaggaatctcaggaggagatcctggggaagcccaaatgctaagatcttttgcaagaacctctgtctgccagccccatacttgcttggcctttcccttttgttctctcagcctgtctctttctgtatgtccctttgtgtgtgtgtgtgtgtgtgtgtgtgtgtgtacgtgcacctgtctccatcctctttctctttgcctcacatccgtatctttctctgtgtgtctcttcctttcacggtctcttctgtgaaatgactgtctctgtgtatgtgtgtttcagtctccgacttttatttctcttttgctttctctggttttattgtctctgtcccactgtgtcagtctccctctttaactgtctttctctccctctctctgtctctctctctctctcatctttatatctgtctatctttaaagggatcacacgttcatggactcagcccctcagcactcagaggctgactttctggtctgtccctggctcctggagcagcctcctccatggggtttggagatggaaaagaggaaagacatccaaggagtcctgcctcaagcagctgggtccgcttgcagaggtgacatcatacttgtcaccccacttgtccgctcccagggactgtcttcttattttcttagtgttgacctgcaatgcctaacgccctgggtacatagtagtcaccctagtaatgatgatgcttcattgaaatgtaagccccaagacaggtttaatagggttgtgaggatttccttctccaaagagagtagccacaactaaggaatttgttttagtggtgacagatgaacctcccattcccaccttgcataatgatggcttttcctgcacggctctggacccctttgaagctcacccagaccccagcctcctttgaaaggcagaagggtgctttgacttgccctgagccggcacagaagtggctggaccaacattctgctcttggcccagatcctgtgcttgggcaggggccacttcccagtgtcttcccactgtcccaccgacgcccttcaggccccccttcttttcccttctctttgtgggagtctcctgccaacttctcctctgcacagcaattgctgcacagtcaaccattttccaaccagcctcgtaggggctgggaggctttaacctgtgttcccatctttgccatctttgggagattgtggtagattccacgagagagagtctccctgcaggccccaggaaagctttgaggcatgacaggccaaatggaaaccaattactactttctttcatattgaacttgacctggagttgctgctttacagtcttagtgttcctctgtaatattctgtggggcaagaaggcagggtttttcttttactcacagtgttgaatgctgacttgaacagatgcaagtactgataagaaccagtacttatccagtgctggttttttatgagggacacagcatgtgatgaactcgaaattcattaactattttataataattcccgcacgtaggtattttcatggtccgcattatacagatgcaaaaactgaggcccagtcaagcaagtgacaaagctggagttcacaccaaggtcttttaggctcctgagccgtgccttcactacggtacctcactgcctcctggggtcttggccataggcacgacttctagcaggcatgtaaggcaaggagttgagttaccaagaaaagtatggcttgggctataggggatgaacagtctcagaaacacaaaggaagcattttagaagtttcccccctgcctcctaccttggaggtccttttctctttgctggggacaggggagttgattctatttggcacgagactagtggcagcagtctcacatttgtcactaatgaatttcatctctgcagttcattgggtcctcccagtgctcatgtcccttgtctagtgcctttcaggcttaatggccagaagcaggtctgggattaattattagtgttaacttccaacttggtgtaaatctattgaactgcatccatttttacataaataagcaagagaacagcatctattctcctgtagtcaatatcagcacatccacaggtgtgagttattagcaataactgtaattgctttgaatggaacaataaatagcgcatggggtcatgatgagaaacgtcattctatagtattaacatagcttaatggcttaagctcctatatatttcatccgttactgggcttctggaggccagctttgcaactcagggtgctgagctcttgctgaattgctttcctgctttggtggaagataattttgagcttttctgaagcatactgattttatcagcagatggccccaggatagcatctcacctctaccattgaggtttcacttgtttaatggtcttctgaaaagttacaagaaagcacagacatatacaagtcccatgtccttgagctgcagtgctgcctgccaaactccaacctctgggcagccgcagcccaggcacagcccctccccaccctgccctggcatgttcatgtttcctcagtggaacagagtgggccacataagaggaactctagtgccatatcacaaagagtgttagggttaggtagatccggagcaatgttccaagaatcctttcttcatgatcaagctgaacatttaaggttacagtggggtagacactaggaagtggcttcaacttctcccaaactgcagtgccttagcccgctgacttcctctctttttcttacctcctcacctcactacaaccctcaactttatttctgtacatcttcagcctctgggagggtttccagagcttttagacaatttgcctggaaggagtcagatcacagtgtagattatcccaaagatcatcagaacttcctcactgccaatgaccctcttctaacatctcctggaggctgttgcttaaagtatctccttctgtacctgagcttcattatctgtattatcctaatctctatgagtgccagaattcagaaaggaggaggggagaagttgttcttggagatgaaacgctgtcaggcacacagcccttttctggattgaatgcattttccaaatctattgtaccctctcaggccaggtttaatctgtattccgaaaaatcaagttatctgtccacttagcctaccttcccactgtaactgctcattcccacgcctcagcttagctcactaaacctttccccatcaaaggctttatctgtggctccttagttcacaagcctgttctaggagcattagttctcaagcatggtatgccaccagggttgtagaggtagaaggatggaggaggacagccagagctctttgtaatccaaagggacaaactggacttgggggaaaaaaagattcccatagcttgagatgtattctcagtcatccatggaccaagcaatggcataaaatcatgttcacttattttttttatccacttaaattttttaaagctatgcatcaggcctcatgctgagcaaatgctcctgcctacacgaagctaataatttagtcagagagccatcataaaacactacattgccaacctccccatagtcggcatggtgaagcaaccagcaacctttccaaaaccaaacttactctttcctgtgcccaggtagctactctgcctttaggttttttgataaagtcaaatttgacagggccctgggacaagttactgagttaaaaaagaccaccttggtggaggatctgccattttatttgagctttctttttcaggaaaagataagaggatgtagaaaagaggttgaatcaatcagcctcactcccctccttcctgacaccaacagaaatgggcccaagtggtaactgagaatataaatttaagaaaaacatgttagaagcacactccccatccccttaatttttgctaattatcacataagtagatcttcacctatgggatactatgcctctgaacctaggctatcaggccacagacctaggaggcaaatgagggggcccaggtcagcaattaatcacagagcaggccaaatgcacacacttcatttcagaacaatttcataaacgttcccctgcccctgccacctccccctcactcacaagatttcatctcctaattgcaaaagctttttggcatgggaatgtctttgtgaagaagagaggactcaatttgggccatctctctaaagaagacacgggaacaaggacgcttctccaattaatcagcaaatgcttggctccagctttcgggccaaaggatcgatttacataaagctacttcttgagatgaatttgcctccccctctcctccccctgccttcccctgccttccccttgtccagccagcattagacatgctactggatttcagattgacagtgttagctatgacaatcaaattagggatgaaagcctcagatggctgccaaggaaaagggacagagggggtggggaccagtatgtcagcctcagaggaggatagattgtatagaaatgggttccctttcccaaaccccactgggcagacacacagcttcaaacaataagagataaacaaaacgccagtctccatccttttgaatcaggtgaacaagctccctgtccacacccaaccaaggttgataaattaaaccagaacttctcattgggtccaaaattggcaggggactatctcaggtactcaattagatctttacaatcagatgattttcagcaccagatttctgcacacaatgtgaagacaccaaaatcgcagttgtaccccctgaagtgtatataatgaggtacgtgtggactgtggaatcagacgcctgtggttggaaccccactgatatttcctggaccacttagtgacacagggaagcctggaccagaacagagggcataattgggctgataatgagagctccccaatcccacctaatgtaactaactgccttgtcgctaaattgagataatcccagggattagtgagctgttgagaagctcagcctctgtcccatttgctggagatgatcagtcaattataatgctgtttcatgaacacaaagagccttagttggagttgcatatgataattaaatgaagaaagcttccgtttggactggaagcatcagttaactctgatagccctggaagagtggtggtttggaaaaactcagattaaatcctatggctgcaaagaggtatctgttcacaggaggaatggctgaatgaatggaatattctaaaccatggcttgctgccctggattcagggctttcaaccttgactgattttcctccacatttcctatctgtatactcagaacccccaagcagtcttgtatcgggctccttagattggttccaacatctgaagactttttccctcctttggcaatgagatgctgcgtagctacagcatcaagttccttattctaaaacatactgtccaatatagtaggcactagctatgtgtgatcactgagcactcagaatgtggccagtccagattgaggtgtgtgtaaaatacacatcagactttaaagacttggaatgaaaaaaggaatgcaaagcatctcattaataaatgtttatattgattacatcttgaaatggcaatcttttggatatattgagttaaatatcatattaaaattaatttcaactgtttctttttactgtttttaatatggctaatagaaaattttaaattgcattcttggcttgtgatatatttccgtgggacagcgccattctagaattagcagatcgcccctgaggaggtgacagtctctgcatcctcactggtcacaaatctgagcctgcaggccaagttcttcccagggtgaagcatccaattggctggcacagagagttatttggttttgattttgttgaaataacatccccagctcgctttctgactattcctgttgtccacatgcagcccgacttcctcatttactttacctgcacaaccctgaagcatctgagtttgcaatctttggaacacctgcccagaaagagacaaaacaggcactcgtattggtaactagtcacagagcaaacctataatctcaactccatctgtagcattttgtagaagcttgcagcctaacaggttcttttcctttttccctttggtcagaatgctcccctgggaccaagcatcttatctccatagtgcttggacctcaggccttcaccctcagtcacagctccaggactgtttctcagcctggctgttcagccctgttcatcacctgccctctagtgatttctcccagatttcagccttcctagaaaactgtagggaatccctggtctgtgaggccttaccaggaatgtcctaatcccagcaaccagtctcccctccaagcttgaaggagtccaaggacaaagtgcttggttttcttctgccacgtctctggctcccaggggagggtgtaaccatccatggactcttacccttctaggtcagcctccccgggctcctgagtggctttctgaaatacagattaaatgtcatcattctccccacttcagccttctcctgtgcctctgcctatcccacaggcattttgcccaacatcagcagtctcatgtctgagacacaggaggcctttgcatcctgctcccaaaattttccctaaaattagactttaacatttaaggtagtaggatgctatatttgtgaacttcatgctagaacatgaagataggaatttgcattatatactgcataagagtttagaaagcactcgcttgtccattatctctgatgcctatcccagtttcttagaagtgcaagttgagattcagagaattgaactggtgctcttaaagacacacagcatgttgagtagcagaaccgggatgtgaacttagcacctaatccgatgcaatcatcattccacccatggttctcaaacttgtttaaaattagactgaagcccatccttagggtttctgattcagtaggtttgggatggaccccaggaatctgcatgctttttttattatggaaaatgtcacacatacataaaagcaaagcacagatgataaatgaaactcccttgtacttatcgccaagctccaataagtatcaacccatggccaaccttgtttcatctattcttctaccacttctttctctcctatattattttgaagcaaaacttagagatcattttattcttaattatttcagtatgtatctctcaaagataaagacataaatgaaagaaaacataaccacaattctattctcactttaaatttttaaaaattaacaggaatgaatgtgtattttgttctcatagcaaggttcatggtctatctgatcagaagattattctatgacaacaacagccccataccatcccaattcttgataatatctttgtactattctgatttttctcaaactgtccaccttgaaagataaaaccaaagtacctgatgaaacaagcctgcattccctgtgagtcctcttgattcagattggcatctctctcttttccttccgaaaatttaaaaagattttgggccccagctaaaataaactgtaaaatcttttgcttggtctgggagcaatccatagtgtgagtttagagacaagctttcttctggataaaacggagaaacagtgaaactggtgctctctctcttttttttttttttttttttttagatggagtctcgcttgtcacccaggctggggtgcggtggtgtgatcttggctcactgcaacctcccgctcccgggttcaagccattctcctgccttagcctcagtagctgggattacaggtgcccaccaccacgcctggctaatttttgtatttttagtagagttggtgtttcaccatgttggcgaggctggtctcgaaatcctgacattggtgatccacccgcctcaacctcccaaagtgctgggattacaggcatgagcggccacccatccttgctctcactttttgaggtgtctagatgtttattttatatttgtagaagtaagggggtctatttctttgtatctgggataaataaggatgtaaactgcaggaggacagaaacttaggactatccacttttctatctcaacttcaaccatagtggaacacatagtaggtattcaattcatttttgagggaaataagcatctgagctgacacttaatccatcagtattaaacatctgaatggcatggccaggacttttctgatgaatctgtgagggaaaggattgcagaaggagcttttattgatatccttcatccagtaactttttaacctcaagggaacacgtaaagtaaactctcactgcaatgaaatattcagaaacacaactggagcagtgggaaataattggcgtttttttgtcccccattgatactttgattccctggatccctgagataggtgtcagttctttcaggaaattagtcattactccattgtaatcttcctcagacaaaggctgccattgactagacacccagctggaggtaccagagcttagctgggacatatgcttggtgctcatttgattttgacagtgacccaactgcaaacatacaatcttgcttattaagataaattgcctgcagaagagatgtacctattaagataaatcttccctgaagtccacattgtagaatccccaggggataatttttcctgcatgtttgtccctcctgctgtataaaataaagtaagcaaaacagtgtctttccctttagctcctagcacagagcgatgtgtcactgggttactatatattagaaagttggggttcagggggcaggaagaaagagtgcagctttatgtaagatggtagtattgagagtacaggaaattttagatttgtagattatctgtcaaaattttttaaatccctaaatgagttttgattgatactgaatgcaccaatgggcaggtttcctcctactgggcagagaatgtgaaagtaattttaatatatattcaggccaaagagaatcagaatggtaattcactgccctgatcccaaatccaataatggttccaaacataaatgctttgaagatcatcccctattttagcctaactaatcaagagttgatggaattttttttaatgttattgaaaaggcaccacattggtctcagtgcagagggattgaagaggtagtcaaagaagtgcaaacctcatcagatgccagattgggttgttcccacattctttggtcagttagtttcccttgtagcctcttgatctgtggtcctagatatgccgtcttttgagagtgatattttaatctgctgaggacttgtagattcagaactatccccgaagccttcttaggaatactttggggtggatccccttgggttccttctgttgctactgggtcctatcacctgcttctttgaacttcactgctaaagtctcctagctgggaacatcttcagcaatctgtccttgggttgctggagtcaccatacccagcattcatggagggcaggcagagcctgggagtttacatttctcttgagtggtccctaaccaaggactgtctgatgcagggctgcagaagcccagctcccttgctcagagacaggagttccccatcatattgggctaaggccaagacttcacctgattgtacttttatttgccttttccattaggtttccatcctcactggtctctcccgggagcacttcattaatcacttaacccccgtgtccttggctcggtgtctgtttctgagagaacccaacataagacagacctcttatttctgaatccagctctcttgttttatccaaaagaatctagaatcaaacatggctacccctgtctagatgacagaggagagaaactttttaatccctccctcagattttatggaaagagtacagcaacatttacgtattttattctttgtagagttgaaggcatatgtcctgggggtgctgaaaaaggacattttcagcaatgtcaatccagtgctaaatgggaggaaattacaaaaaggaaatgcagctattcattgagtgcctacggtgttctaggtgctgtgcagagtgctctgcagagcactacaagctgtagtctaataagtcataatggcacctgtatagacttccaggtgggactgtgatgtttctgggcgcactatccgtatgacttaggaaagcagtcccatttgacagttggagatgtgagacagagtcatgcagttgaccagattcacacaactaatgtgcaaatgattccacacggtgctctacgtgtaatcatttcgctctcacaactaactgatgaggttagtaaaactaacaaccccactgtaaagatggggaaactgaggcaaagagcattttagtaacttgaatgatcatacagctcataattagccccacccacttcagaaacaagaaatctccaagttttgaggaacttccaaaccccattttgtagcttcggaattaatttgggagtgacctctaggatcaaattccctccaccaactgccatttaacacagacaggatttcctggtagcatgaatgtgaccaagacaagtgcattgtccccagcagggcaaagaggagaacatgttcctcctcctagtcttgcaggggtaggggtgaaggtgggaactgtcattctctgctcctccaagaacaaagcatgcctgacattgcagggagagccccaggaagcatttcaaaagctccactggaactagacagcctttcaatccatttatcaaagtgtctgcagttcccatttcaagggtagatgaagcaataataaatttgcgaagaaagttaatctgtgtccaaagcattttagtaaattaaaaaggtggggagggtggctggaagggggatatattggttcttgccaactcctatttgacttactgtctccttaataagtcctctttggtcttgtgtttttggatggaataatcagttggttaatcattttccggaagctggaaaatgcactttagctaatgcagttctccttttctctcagagccctaattatttaaaaaggcatcccaattcctagccctactccccaaccaagaaagcctttcccaccagccatcttcctttacttacccagaaaaatactgcacacctcccactcctgcaccctactccaatctcatgcctttcttctagtgtttagaaaaacaaaaatccccttctcaggtcacttctgagcatgtctgccctcctcagccctgagctgcttccctcgtgaaaggggagacactaaaaccccaacaggaaattggccagcgctaggctcttgggcatcgtggatagattttgttatttttatttaagtgtcagtggaaaatggtggctcttgtctctctcgaggatagtacttaatgatagctccatgctctggcaccacgtagagataaacacactattaggaactctcacaaaggccctgcgataattgtgaagggactgttaccgaaaatgaagcgcccagccctgaaccctcctccacgccccatcagtaacaccattgaagctgtcagtttgtcagcccactggaggtatttatgaaatcaatatacagtcctgcagatggatggcagcagtattgttagccggagaagggaagctcaatggaaaataaaattaataaaatttacaagcagattgtcatggggatcagataaattccctacaatctactgttttgctcaattgggacaggaggaaagcagtgacagggagatgggaagaaagctgtgtttcaactggctccgtaaagtaggagcaaggctggttatatttacagcaagaaaatagtgaacagaaaccaaagcgctgccccacccaagtgcaggattttgcctgtgtgggaggtctcccagcaacatggccagatttttctgcttaaatatcgctctcctctcctcatcccaccgtattgcaaatcagaacctttgtacgactgctactcctcccagtgtattatgggatgttgtctactcaaacaaggttagtgcattactggaacacatgccccctcatccagcttccagctatggttcaagctgacagctctaaacctctctcctgtttgctccccctgcctctgattttgatcatcaaccattttccaaaagtgtgactggggctcatcttccagagccgccagagagagcagccaatcctgggagggtagtgggcaaaggctcggtggcctacagaccagcttcatttggcagaaaagactggactcattgtgactgccagagcctcgggtgctgcccagatgcctggtggaaattgcattagtcagatgacaggacctgggcccctgctccggaggctgatggagagcagctgagtggccttggtgacaccgcctgacctctgctgtcatcgtgggctttgttcagcgccccgactccaggctggagccctgctcattgaatcaggcctggctgggggagcctgagacagcgctcattgtgcatctgaatttacttacatcggttgcagacagaggaaactggatttgagatagggagcaccctgttactcagccccagaagccactagtactcacaccggcactctaccccaagtcagccttgttttgtgggcctaaaagtagccccagatgatcgtcaagtttcgttttagctagctgctcagagcacatggcttgtcccagcagcagatgggagatcagaaaaaagtggacacctcttttctgcttcctcttttccctcctgcccctttgcaaaatgttcatttagactgcccagattttagtggagggcagtcgtctgatgtctcctgccaaatataactggagtcatctaaagcttttgattaggtgcccttggaaaatcagcatggagtgtccacaggtacaatctgtccgtaggtcaactcaggacccatttaacctgtgaccagcaagttctccttctaggaccccgtaccaaggagatagttagacaagtgtccccaaaatgtgcatgcacagaagttcaccctagtgttttcattaaatagcaaataaataaatgcctacccaacaatttgggacccatatagccactcatacaattggacgatatacaaccattaaaaatgttgatatcaatgcactattaatgacagggacagatgttctcaatatagcaagcaaaaataataggttataatagactgtatattgtgaggtcatattggtggaatttcatatatatatatatatatatatatatatatatctcgtaattggtagcagtagttagatctgcaacgttttttttttaccttaatatttgagggtttttcgggtgttcttttaaaaaataatgtgtatgtatagcactgtgtgtgtgtgtgtgtgagagagagagagagagacaccttttatatctgaagaaagtgtaaagagctcattgtgtccctagcccccggctctgcaccccccgaccacgccatagtcctcagagaggcttctgcagcctgtggctgtgcgggaacagcctggaaggaggcctggcatgagtgttttgcagggccagtttgcacgctctggaggcctgatgggtcggtctttacagattgattactcgttgagatccaagcaggcctgcgttcttagtgaaaacaagtgcacatgtttggtctagcaaaaactaaatgtgggaaacaaaccaaaaaaaaaaaacagcccatatctttcttagaaaggaagtaaggctttgggaatgcttacagtctggggacataggtttagccagctgtagaacctgacactatccctcaccctcctcaaagcaacatgctggcactgcttaatgctagatgaggtgcctgtgggacccccactttgcatggacctgtggaaatgcaatttgaaattatcgtgcctgtcactaagaaggtctaggggcccccaggaatctctgggactctcgagtaagctgaagtggtcatcccccatcagaaaatcagaatgggcaggctctgttccaatcccctgtgacaaaggcagattgtcctgagcagcagaggacagcactgagagatgggagattgagcggcgttgaccccacagtgggggaggaatgccgtgtgggggttggggggatggggggcagggggttgtctccgggaggtgggaaaacagagaattgggtgcagtgtgtgcaacaaataacccagcctcttggctcgtggcctggaggtgcgagaccacccacagagcctgccctggaggcgagctgctccgcctggtaaccatttcagcaacggccatcacttgaagaacaatgtgaatgcttgtagcagcctggggcccgagaccaaacagccgccatacactctgaccgcagaggcagcagcctgggtgggggggattgttatcatttaatgagatgcagatcaagacagcctgggtctttaatgcagtgtgcctcttctcttcttgtttagagatttgagtgaaaaccagatccaggggatcccgaggaaggcgttccgcggcatcaccgatgtgaagaacctgtaagtgatgttttccttgcttcactacgtatgtggctaacttgggctctctgaccagagtgagggtgagggatgggacaagagggtggtccaggtgccttcagagatgaaattgagggctgtgcttgagtgatttctagggaacacacgttggatgccacaatactgtcacagaaacctgtgctttgctggttagtcatccccagatatgagcactggagcctcagtgcctgctgagttagagcctggccctacagagccttggtgcaagccagctttgcccagcatcattatcatcttctgtaaaatggggatggtaaccttgtgggcatgttttgtgcaactgagaaagtgttcaaaaggaagaaatatcttagtgcctcatacatagtacgtggtcaatcaattggaaccttgacgatgatggtgctgaagctctcactcttattaataggctcatcatcggctcctgagagagcatggggacttacatcccaggaagttggagagacatagccagatccatttccactggcctaggatttttttttaaactttttattttaaaatgatttttgattcgcaggaagtttcaaaaaatagtagacaagtccgtatactagtttcctccaatggtagcatctgacataaccgcagtacagtatcaacactaggaaactggcattggtacaatccacagaccttagtcttcagatttcacagctccacgtgtgctcacttgtatacgcctgtgtgagcgcaggcataggtagttctgtgtgatttcatcacgtgcagatttgtgcagctgtcaccatagtcaagcgcaggactgttccagcgtgacatttttgaactttgacgatttcctacctggcttctcctactgaccccttattcgtgactcctgggcccctacaaggactatgccttgaattttctgcctaaacctttgtgcccacggggtcggaacatgcttttggagaggggtagggaagaaggtctgatttggctgagcaagcacttctgcccagcagccttctctgcagccccagattcaatttgagacgtcttaagggaggcttaaaaaaaagacattgtcacttttccctgtaatgaatgcaggggttttagtttactggcacactcaaggcagctggtgatggcttccagatgcaggttatctgcctcccctgtggacttagcggaaagcttttggtgttttacatgcaaagcacgcaagagggcagaggcgtctctgggggtgggtggagggaacagagaagcagagaggacttcgcaaggggctcagggacaaggaggccgcctgctgctgcttctgagggtgttttcccaagagcaggagagggcggggtggagcagccacacccacaaagaatgggagctcctttgcaggacaggtgtaggcttctcgcaagaaacagcctcctgagtttatatcttcctgagaaaatgagatacagaaaagccaaaccttcaaaaccactaaataaataatgagagatctctcatcctgaactggcacttttaacatgtcagagcgcttttctagtatttcgttccatgcattccaagaactcaagactgttcacatgaaccaaaaacaactatgttaattagcctgccagaacgtcagggtatgagaaaatggaggcccagagaggggcagtgactaactcagggtcaaccagctttctggtggttgaaccccaaaagaacattttgcgtatataaagtgatatatcagtcagatctcatgacactaattttaaatggatccattaaccaaaaagaacatattgtagtgatgtataaccagagctggacagttaattgctgactatgtttttgattgttaagaaagtgaataaatcccacaattgttcttaatagttgctagggtttctcagattttgttttacagggtctcttttcccctcttacaatatctctaactacgcaaaggcctcaggacttgaaaggttcaagattctacaaacccagactcctaagtcactccagcacccaccatcagaccaccctctaagccatgcaaatgtgtattactcaggatcctaaactcagtgaggatcttctctttgtttatactcactactagcagctgggcttgcggggaagaaggaaaggggagtgaattcactgcctaaaggatgaattaaccaaaaacacctaaggggaattgaatactgtgtacctctaatcagttcagtcagcaggcacttgtcaggcaggacccaaaggccccagaggtacaattcatgttctccagtagcttacagtgtaactggggacaagaatcatgtacatacaagaaaatgtttagtaaagtaccaatcaacatgaaagttggctaataagtagctatacgtaatgaggggctgtcagagctcagaaggaacagacagctttaggcaatgtagcctagcggttagaagcatggttttggcggtctgatagaagtatgtatgaattccatgtgttctaggttcttagtctgtgatgttaagtacattacttgacacttctaagcctatgtttccactgtataaaatgaggataatagttggacttacctcctagggtttttgtggaggttaataaaataatgcatatgaataacttagtcctacgcttgatgcatgaaaggtatttagaaagttctaactactgttgctgctgtattcctttgttacaatagtgaagactgtagctgggcctgaatggtggttagaattcacaaagtaataaagatagtacgtgcaaagtgtaaaggcaaaactgtataagatgtgtttccagcagagacatctcatgggagtggagggatctggggcagaagagtgtgtgattgggttagaaagagaggtggaagccggttgctggagagccttgactgcgaggagcatgggctttagatgtaggcactgagaatgtggatggcttttgccctgggacagatcacggtgaaaacatttgttctggaaggggaaccggggacaggaggaggtggcagaaggaaaggtcggggcaggagatgaggctgtagtccaatgtgagggtttaggctcgtatctctctctcacgctgtctcttgggagagagaagcaggaagtggagaaagaggccaaagtaagcagtccctggggacaaaatcaacagagcttcgcagtcagtgagttgctagaggccatggaaaaggaagtgaaaaacgattagttccaagttcagacaatacagagaatgatggcaaattctcataatcattcattcacactattttttgagtgccttctaagtgctagttctgggggaaacagcagggagtaagatatatcaatataaatctgtgagctctgtcttcttggagcttccacttcacagaaatgggaagttcaggaggaggagccaggcttggaagatcctgagttgggttgtaatcacattgggtgtgaagtgatgtcaagtcttctgtcagcattgtggacagagcatcttctctgtgtgaggaagtttgtgatctgacatcctgtccagttcctgctggttgaaggactttgctaaagccacgctatgtctctggtcctcagcttccttggttttaataagagggagtcagactaaataatcttacagcccaagagaaaaactcatgtgagtaattagaactgtaggacctgagctgaggagctgatgcttcatggaggagaagcatctggacagaggtgataatgaagctgtatgtttaaatatgcatcggcacatggaaaataagagacatttagcacaaattaaatttctataaaacctgctaaggaaacactcctcctcctaccagtcctcagttatggagattgtctaccttgtgaatgataaatagcaaattttaaatctcagagatgcatatccttgtcatcagcttgtttgagaaccactacccagcccccaagcctgctccaccacagtgtgtgagctcagggaattcacaccattccactattaccttaaagactagaagataaactgctggcatatccagcttcaaactgcatgctatgtaaaatgacaaccagttgggcctatgtgtaacaccatacgctttactacacggagaaaataaaaaactatctggtttaaaaaataattttgtagttttgacgtatattttctttgcttgcgctgacatttcccttcaagaaagaagaggctgtggccaggtgtggtggctcatgcctgtaatcccagcattttgggaggccaaggcgggtggatcacctgaggtcaggaattcgagaccagcctggccaacatggtgaaaccccatctgtactaaaaatacaaaaattagctgggtgtggtggcaggcacttataatcccagctactcgggagactgaggcaagagaactgtttgaacccagtaggcagaggttgcggtgagccaagatcgcaccattgcactcccgcctgggagacgagtgaaactcagtcttaaaaaaaaaaaaaaaaggaagaaactgtgatacccacattttccacataaaattaagttttcatcaatgtgtataagttggtaaaagtcagcagataaaattaggcctaggcctctgcaactaagctaccatccatcagtaacacacccaaccatcttttggactttcgccatggacacttctgtctacccgggttccttttctcacagccatgcctgcaaacaggaacaataaagtgaccagaagctgctacagagcagagtccctattcacctaagcaagtaggcaagcatgcaacttttatcagagcccagagaaaggacgcaggcggcctctgagccctgtggacctgaggagccacaagcatgatgctctcagtgaagggactggacgcctgcccctccagacagcagaaggaagtccctaattgcttcctgcttctccagagaagagagagaacgtaattatctggggatgccactctacgcaattactgaaagctggtttaatgggctggtctcattctccactacttgcctagaagggcggaaggtgctgtatttaaagagagacaggcggttcgatggacaaagtgatctggatgaagaaagagacccttagagagactgtcctgtagagagaccaacactcaccactccagtatgaaatgcctactgtatgcagaaactgtgctaggtactgggcaaaggcacagcgaaaaggagagaggagggaaagaaaaagaaatcacggaaagacgtagagatagaaccaaaggaaatgaattgggaaaacaagagagatgacaggccacaatccagccaagcctaataagaaaaagacaaaaaccagtagggattgtttttttttaaatgtccccttgccctgtctttctcagcagttatgttttcctctgtttttcagtttctatttgcgaggactgtgtaggacatgcattccagaagggaaaatcaataacccctgtctctgccagctagcagaatttggaattgacgctttgaaaacaaagctgggcaggcagcctttgtgttctctagttagtctgtgttgccgcaccgcccgtgtctgccctcctgcttcctgagattaatgagggctgtctccgccccggtgagcaggtggtaatctcatgtgagggtgagggaggtgtggggagggacaccagcacccgttcgttggtagcatctctgtctgctcatctcagcagccatttgttttgtcactgcacctggagcagtgtccacactcctggtcttgtcctgcaaggctgtacgtgaactgggtgctctcacttatctcatgcttcccatgctcctttacattccctgaacaccccaagctccttcctgccccaggacctttgcacttgctgctcccttaacataagatgctacaccctcagacctccacacagccagctccttctgatccttcacatcccggctcaaatgttgcctactgtcccccactgccttccctctctatcccatcacccagtcatatttcttcagagcacttatcaccctctgaaattatctcatttatttcttgttactggatgttatcctgttattacttgtctctggatgcacatagcaaacctgtgtacacagatatcctgcctgtttcaatcactgtgttgtccccagtacccaaatggttcatggcaggagtaaagtggactagaaatgtattgaaagaatgactttgttcattcatttcacaggtgtttgccgatggcccgttacataccagaaatcatacacattgttaaaatgctttatatgaaaattatatataccatatactatagaaataataatataccatattgtattattattgtgtaagaataatatactataggaaagaataaggtgccattcttgtatccgaagaactcacagtctaatgatattcccattttccagatgacaaaattaagtttactagtgagggagtcaattagtaaacccgcagtcataggccatggattaaggcttcgttggagctaaggacaactatatgtggaagcccagggagacaggtctcattctggcttcactcaggaaatgacatgagttgggtcttgaaggatgcataggagttcatctaggggaaatgtattgcaggaagaaggaacagcatgtgaaaattcaccaacatatgtaaagggacagaggtgtgtgaaagagttgatgctcgtgagagatttgtggctggagtatagctagcaagagaggcaataaagagcaatgaggttagggagatggggaggtgcaggaaggtaggacctagaaccccatgatccatagagcaatgggggtttattggggggttcctaataggggagtggcatgatcagattttcacttaagaaaaacagcttcagcagcagtggggagggtagattgctgagaggcagagactgaagctgtgtgggcagagaggagacttgtgcagttgttcagaaatatgggggacctaaatcgagcaagtaaagtggatctaaaaaggcagagtcaaactgcagggactcaggggctagctgggtgggggaactgagtgcctgttaccagggcttatcaaccagagacagaggtgtacttcagtgcaagccggctctgacgcaggaagagtgcctggctctcgtctcaaatggggtgctgcatcttgaagggggatttaggaaaatctgctcatccgaggcaaggccatgcagatttatcatctctgggaagtgcagcaagttccccagcctttcctgctttgcattcctgactgagagtgtcaggttcagaattgctgctagaggaagttgcactgggccccagtttgctgagtgctacctaaaaatgctatctaaagacaggggtcatgtctaccttcctgcctgcctccctccacccttctctttcccttcctttcttcctttttttcctccctcttatcctcccttccccctcattccttcctgtttccctcccttcctctcttcctgtctccctttctcctttcatttctttttctttttcttctctttctccttctctttcttcttcttcttcttctttttttaaggcggagttttgctcttgttgcccaggccggggtgcagtggcgcaatctcggctcactgcaacctccgcctcctgggttcaagtgattctcctacttcagcctcccaagtaactgggattaccggtgcctgccaccacacctggctaatttttttggatttttagtagagacagtgttacaccatgttgaccagcctagtctcggactcctgacctcaggtgatccacccgccttagcctcccaaagtgctgggattacaggcatgagccaccatgcccggccaccttcctcctttcatttctccctccttcctcctctttcttctttctttctctccctcccttctttcctgttttcttcccttctcactctcttcttccctctctcttcctccctcccttccttcttctctcttccctcttcccccctttctctcttccccctctgtcttcctcccttctttcctctttccctctcttccctccttcctccctctcattctttctccctccctccttttctcccccgcttcctcccttctttcctccccctcttcctcccttctttccttcctttcttccactcttcctttttattccattcattgttacacaaattaccactgagcccttactcttgtcagacctgaagcaaatcttaagaaagatgactaagacacggtcctgctctagtgaatttttgtctacagggggagacatgcacagcaagcatatatcacaggataagcacgccccagggcactcttctctatttgccccggggccaatggcataagtgctcgataaataccagctgattagttaaatttcctgaaatgagaaaaatagtagaagaaacaggtagatttgactccattagtctgataaagacatatacagtattatctaaaagcaaggagagagtggtggtaaatgccccatcccagaatttctgcctgggattggaagttgcattggtgacaagtagaatttcttctaggccaagatgacacagtttcatagacagtaccacaggtcttctggcagactttgcatatttcctaaaacacccctccctgcgttataactgtctactcagctgtcctcctcctcctatagcctgtaagttacgtaaaaggagaggttgagtctgcctttttcattgttctgtttttaagagttagtcctatgcctagtatgtaatgctcaataaacaataagcgaaggaataaatgacttgcagaacaaagagactcccgtttttagggaacagctgaaaccctgaatgaatgaatgaatgaaggggcatgatgatatcctagcaaagaagaataaagtcaaggcaacaagaaggagcccagagaagcactgatgttttttcaggataatggagactattattttaaagccagcagtacaatttattatctgagacaatttgatttgtggacgaattttttttttaactcattacaagtatttaacccctttgagcactaaatgtacagcaagcaagttgtttaaaacaggcatataaaatataatcctgtcttttatatactctggcaaaaaggaacagtgattctgaccccctcaaagtacgactcaggggtcttaggagacatttgccattggactgagtctttgcctggtgatttttagctccacagagaaatgtaagggacttaggaggagatgagtattaacatggagatcatactttgaggctctggtattcgttgatgttctgattctttatcttattgggaccaagtgagtatagtgattaaaagtatgagttttggaatcaggtttggttttttttttcagctttgcctctcactacctatgtgagcttgggcaggtttctcaactcttagtctataaaatagagaaaatactagtgaggagtccaggagggagaaactctgtgcctcgcatttgtacgttgctttctggtttgcacgcagccttcacgtgtattatcttatctttgagagagagagaaagtaagtctcgctgtcaaccaggctagagtgcagtggcaggaccttggcttactgcagcctctgcctcctgggctcaagcgatcttctgcctcagcctcccaagtagctaggattacaggtgtgagccaccacacccggctaatttttttttttttttgtagagacaggattttgccatgttgcccaggctggtcttgaactactgggttcaagtgatccgcctgcctaagcctcccaaaatgctgggattacgagtgtgagtcactataccggccatatgtattatcttgtttaattactgcaacagtcttgcaggaccactagggaaaagttgcttatcctctaggtatagaggtggaaattgaggcttaaattcagaaactctcccaaggccacaaggccacagaatgggtcatggcaaggctacagcgggatcccaagattagcgtggactctcaggcagtgtttttctgagagattggccgggaaaaaccctgagatttggtgagcatggagggatgcctggaaggaaacagcagatacagacagattcatggggagtgttggaaaagcatttctggcttggtatcagccaagacccaaggtaggagcaggctgtgaaggtcacagttgggacagaatttccaagaagaccatcaagattgtctgaaagtatgaacttttggccaggcacagtggctcatgcctgtaatcccagcactttgggagtgcaaggcaggtggatcatgaggtcaggagatcaagaccatcctggctaacacggtgaaaccccgtctctactaaaaatacgaaaaattagccgggtgtggtggcgggtgcctgtagtcccagctactcgggagaggctgaggcaggagaatcacttgaacctgggaggcagaggttgtagtgagctgagattgtgccactgcactctagcctgagcgacagagtgagactctgtctcaaaaaaaaaaaaaaaagaagaagaagaagaagaaaagaagaaagtacgaactttaaaaaaaaaaaagactttaatttttagagcatttttatatttttagagcattttgaggtttacagaagaattgagtggaaagtgtagagagtttccatatacccccaacacacaaccatacagtttctcttgctattaacaccttgctttagtgtggtatgtttgttaccactgctgagccaatattgatacattactaactaaagtccctagtttacattagagttcaccgtttggtttgtacgttggatgggttttgacaagtgtgtaatgacatgtatccactattacagtgttatacagaatagtgtcagtgccctaaaatttccctgtgtcccacctattcatccttccttccattcccccaaaccctcaagtgtgagcttttaatcatgcaggtaaattctttcattttcacaacagcttatatttatttggtttttcatactctcagataagagtctcctttttcttctttgaaaaagggtaagtgactcccatgtgtcaaagtgcatagagcaggtcagcaggacagccaagccctgactcagcttcccagccacagtgtgaagcgtatgagtgtgaaagtctctccttcagagaaaagaccagtggtccaaagaccctgcccattcccgtagctgtgcttccccaaagaatctctgaggaggttgacataatggtgaagtgctcagactctggagtcaggctgcctggagtcaaatcctggttcttaccacctttatgaccttaagcaaattgcatgcctcctccttagcctcagttaacccatatgttaagtggaaataatataatccccctttatgatgttgttttgaagagtagtaattattattgctgcttttattccatctctgagaattaactaggcccaggttatcacatcttagagactaaatcttcccttcctagacaaatatgtgcccccaaaaaaagtcatatttatagtttcctggctctgaaatgaccctccctaactagtaaagatatttaacttcatcactctttctgttatttctttgagtggggctgacctcttccggcatatggcttctaatgggctaggtataaagtaggccagagaaaaagagggtgtaacttccctgccctgtcccttcctcttgtccccaccaagacatggaaaggacgaaaagaactgaggagtcccagctccgctattaaccgctgcctgcctagggtaggctgaaaaatggctcttctaaaaatgcctacatcctaaactctaatgtatgtgaatgtgtactccacatagcaaaaaggattacaaatcaagaattcaggttcttcaagtggatagattatcctggattatttgaggggatccaatgtaatcagaagggtcttcataagaaaaaagacatgtgctggaagcagagagagagaaaagaccacgtgattcagggaaggaggacaaccccgatcctggaaaagacaggaaaacagattgtaccctggggcgtccagaaggaacgcagtcctgctgacaccttgacacgagcacagtgaaactgatctaggacttctgacctccagcattctaagacaataaattcgtgttatgttaagacgctcagtttgtggtaattcgttatagcagccatgggaaaccagtactagaaccaccctcaggctgtcaccaaaccctgtcgtctggatttcctcttctattaaaataaatcattgacataaaatcagtgaatttcaccttgtattctgagaaactctggtgcttcaagagcccacaaatagttattttcaacagtgataaagatttaaattgcctcttttgacattagtgtgcaacatgagattttgtgtcacaaagagcctatggggagaaaaaaggcttgaaaaataaccactggacttgataaataatctttcaggtctactcatatcacagagtttgatggttctttgaggccatcttccaccaggaaggagctaggttttgtcattgaggtaaaattccgtggcagggtcaagaagccagcaccaggtagggacagcataaaagagaatcaggataatgccaggtctctggactcagagctggactttggaagctcaactccaaggttgagggtctgagctgggctcactgtgggaggaaaggaaaggagaagggttggtgttgactgggaggtgattacctggaatggggcttagggcttttgaaagtttccagatatccttgggactggttagggatttctgcagcagggcaaagtttaactggctttcttggccattctcccttccttcttgtagccccagataaactactttgcatctgggggcaacagccagttctggaaagagaattattagagactcatgtgaagacatcgtgagccagtcatcaaaaatatttgctagatgaataaataagttgcttgtgcagagtgcaggacggtggttttcagagcctgagatctctgccgcaatactgctcatggtacatgtgggtctcttttattggagcagatgtttcagagcaggcttgtatcagaactgacacatccatatgcatagcgcctgccgtgccggcacggagcacttctgtgtctgccacaagcattcagctctataaatggatgtgttacgatgtgtccatttacaccgacagctattatttgccattgttaacattctcctttaaagttctctctgtacgcagtccccaggcacaagtgcgcaaacctaaattacttttaaatgccaatgatccgttcctgggtactgtgtctgccaggaaaacttcctagccagacaagtaagtacccagtggataaggtttggtacatacagcacatggtccagtagcagttccaagatttcccagctaattagcattctgtttttaaggttgtactcctctttctgctaatagagacaacaccatttcttgggctgagagatggggtatttgtctgagataacttctaaagcccataatttacccccaggtgatcatatctccccactgccgacatgtacaccaaataaacagaggctgtgtcaaggaaggaatgaagcctcagagactttccttcttagtaggcaataagcttttgtcaaaccctgactgcatatcagacacagttcttattaatttctacctattatctcccttaatccttgtgacaacctagtgattaccatcaccagtttacagatgataaaacggaggcatacaaaagtgaaatgatttacccagggtcacatagtcactgagtggcagaactgggatttgaactcagtttacatctagaacctgtaacctgaaccactctgctatgctgccacagattagagaagtatttaatgaaaggcaaaaactgtgatccaaatcccagctccaaacaacttcaagtttctttttatggggtttcaaaaaatcagtaaattttgcttgaaagtctggatttccagcttctctggagaaattaaaagtgttaacactgggtgcccagtcctgcccggcaaccacaggccaaccagagtgacaggtcccctcttaaacatactgtgtgccctcctatctgcagggggcctgctccatgagtcctgcaagcttctagggagtcccattgatatgtggccacctcttaccccagaaagatcccattctccaatagaataggtgagattttctctttctgttttgctagctggtgatcttgggcacactgcttctcctccctaagccttcatttccttttcaataaaataaggatgattaatccttaaccaaaccataatttttgcctttctttttctttttctttttctttttttttttttttttttgaggcagattcccacactgccacccgggctggtgtgcagtggcgtgatctcagctcgctgtaacctctgcctcctgggttcaaaagattctcctgcctcagtctcccgagtagctaggattacaggtgcccgccaccacggccagctaattttttgtattttagtagagacagggtttcaccatgttggccaggctgttctcaaactcttgacctcgtgatccgccccctttgtcctcccaaagtgctgaaattacaggcgtgagccgctgcgcccggccaagccataatttttaacgtgaaagttaaatgaacctatagttccagctgctagggagactaaagtgggagaattgcttgaacccaggagttcaaagttgcagtgagccgtgatggcaccagtgcactccagcctgggcaacacagtgagacctgactcaaaaaataaataagtcaaatgagatgacacatggaaaggacttattcagtagagcctggcacaaagtaggtgctcaataaatacaatgttagtattctgcaccctcatcctcatgcatccttcatccttcattgatgcacacagagtttatcttacagttgggctattggcttgcggggttagaggagaaggagttttggggtttggtttggtagtcttgggattttctctgatttagaaacaagaaatttaaaattttatttgaaattacttgattttgagatgttggcacctaatgcaaaatcttcttaagcactaagtgtccataccatgttgggcaaatccagtcatctgtgggtcccattcaactactggcctctgatatagatcatgcctcccagtcactggggtgagcctgctgcaggccaaggatgtgaatggaagattctggtttttcctgcagctgcaggtgtcaataatcttgctaatatgttagcaagtcttgatgccataatcccttgaatcagtttaaatccaactgcctgccaaggccttgaaaaagcgactctaatcgtggcaatcaagaaggctcgggggaggcaaatatgggagcagatcttcccaaaaccaactcacatggaccattgctaattgtacaaagcagagcactgttcctggacttgaacatccctttctactacatcttgtagtgttttgaggctgagcactctgcctacatcagggtatggccctggcatgttccagaagtgagtgactttgccctacttcttcaaagtcacacaccactggtcattttcactgaagcatcccaaagactccaaataccgagggaccaacacattctttagcttgactcatcattgtttatttagacagattgtttcctcaatacatgcacatctatgtgcctctctgtcaccagcaccatctcgactcttgtcattgattgcctgttctttgagaacaaagtagagtcaacgactcataagtcctacagttcccttccccggcctactctagaatttttctctaattgttttttaaagtcataatggtaaagtaataattgcatggtttcattgtagccacgtgcaatgtttccaagcatagtttgaaaaccacctgctccagaatctcccagaccttatttagaatgcaggttcctgagccctgttagcaactaactgaatcctgatttctggtcaaggcccaggaatctgcatgtttaaaccactccacagctgattctataacttttgagaacgactggcatgcagaatacagacttggcattgaaatgagaagagatctgggttcgagtcttagtctccccactagtcctgagccaattgctagcttctctactaagcttggtttcttcatagagactaaaggtagtacctaatgcagagaatgtttgtaaaagagttagcactaacacacagtaagcacttcaaatgttaattattattcttatatcatttaattgctgtaacaacccagtggggttggtgggattatccttctttaaaagatgaagaaactcggactcagcaaggttaggtagtttgtccaaggtcacatagcagagtcaaaatatgaatctacattaatctgactcactgttaacagtgtttaaaacaattgggggaaatcaatccaaaattaaaatgagagtgaagaggcctgagaataaaaagtgggggaacttccacacatgtaaggcaagtgtctgttgtctgtgttggattttcctgtgtgctgttcggcatctggccaggagtggagatgagataggtgatggttgtggctcacattgagtcctttgtgcctaatatccaagccttcattgctcttaatttgtcaatcccttagaatgttgtcaggcaaggaggtcccacattatgacagtggattggagaatgtgggagggcctcatgtggaacaaaggcaaagaacaaagcctccctctcagttactttgagactttttctccaaacagtggagggtaaaggacctctggttctctttggagcctttttgagtttctccctgtgagtggcctacaagctgaggatggagtctggcccggctttcagcaaatgctgactccgcctgcactttggaaacatgaccccggctaggctgcgagctggctgccatctgtcccgggccagtttaatccacacatcttgtagagagaaggaaaaagtgaaaaagctgtcttgaaaaagagatgcaaagagtcacagagcttcctcaaattgggttactctaccatagttgggtagatgggaaggtcaagctgcttaggaatgagaatacagtttgagataaggaattaaaccattaaaaaatctaaccaatatattattagtattttgtttaacaaagcagattatcaaatcatatattccaatttaattaaataaaatggaaggtacatttaaaagtttgaatatgattttatatatgtatatatttgcatggggaaaaaagcctgaaggacataaaccaaatgatagcaattgtcaactataagtgataggaatttggatgattttattttttaagtcaactttattgagatttaatctacctaaaaaatgcatccatttcatctgtatgattctatttatcttgaccagtgaatagccatgtaaccaccaccaaaatgtccttctgtcttcagccagtcctctctcccatgcatggatcctggcgaacaccaatctgctttctgtcactgtagttttgcctgtagaactatttcatataaatggaatcacacagtatgttaccttatgtagctaacatctttcacttagcgtagtattttgaaattcaccctgtgttgtattgtcagtaatgtgttctttgttactactgagtagtattccagagtatgggtatacttcagtgtgtcaatccattcccctgttgatgggcatttggattgtttccaaatttgggttattacgaataaagctgctatgaacattgaattatatgagtcctcgtgtgaatgcaagttttcatttccctcacgtaaatacttaagagtgattttattttttttccttatccatgttcttttttttttttttttttttttgagacggagtttcactcctgttgcccaggctggagtacaatggcacaatcttggctcactgcaacctccgcctcgcctcccaggttcaattgattctcctgcctcagcctcccaagtagctgggattacaggtgtccaccaccacgcctggctaatttttgtatttttagtagagatggggtttcaccacattggccaggctggtcttgaactcctgacctcaggtgatccacccgcctcggtctcccaaagtgctgggattagaggcgtgagccaccgtccttatccattttctaatattgctacaatgaccaaacattacttaacaacaatgatggcaaataccagagtagggaaaatctgtcctctatcccattgtcttagaaaactaatgtaaattgcgaagaaagccttcatcagtatatatggcccatggttatcttgacttcagacggcatattcaactccttcccatgaaatttagatgtgattagagagagttcttgagttcttggtaagaattcagaggatgctgaattggcaagggtgctgggccatctttcacactgacggtgggaatgccaattggtataaccccctcaacaggcaatctggcaacagctaccaaaattgaaaatacacatactcttcaatctatcaatttaactttgataaatttacttaaacataatctcatttaagtccccagagatgtttaggtaagtgttatttgcaaagaaaatgtcttgggagctacctaaattccaataggacccaaagcaaatgaatcatggtatgttcattcactgaactattgtagagtagttataaagaatgaggttgatctttatatataatatgaaacatatccagagctcataaatgagaaaactaggtgcagatggtctgtacagtcttttaccacttgtgtttttaagcattatgcttgtatttgttcacatgtgccttttatttgagacaaggtctcactttgtcggccgggctggagtgcagtggctcactgcagcctcgacctcctgggctcaagcgatccttctgcctcagcccctgcagtagctgggactacaggcacatgccaccacacccagctaattttttttttttttttttgtatttttttatagagatggggtttcaccatgttgcctaggctggtctcaaactctttggtcttccaaagtgctgaaattacaggcatgagctaccgcacctggcccacacatgcttttatatatgtgaaatatttgtggacaaattcataggaaatgctgacagtaattgcttctggaaaggcaaacttctcaacttggggaacggggcagaagggtgttgcttttcattctatactctttgatctctctggattttcttttgtcatgtgcatatatttgtgtaacataaaacaattttatgagttaaatccacctgatctcagcccaaagaatgggggtgctcccatttcacttgattccctggcatctgatgccagagcgcactttcccagcaagaactcacaggactctgagttggccatgccctgcactgcctctgtctctgccacggttgaccctccataactggaaaccatgatcattaccatttgcataagtacaaccacattgacccatggctgtggctgtcagttttgaatgaggggaattatttgtattcaacgggcatttctgattgtggccttgaccagccctgagatatctttcaacaacgaatcaccagcagccaaccccatgacctttggaaaatgaatttgcctgccattgggccggcctcagttcttttgcccaagtaaaatgtcaattagatcactggctgaatatcgcttttgtctacttaagcatgttcagctcacaaagccataaatgtttgcttgcttctttcttgaaaaaagactccacacccaagttcaaagtatgctcctggctccatatggtcactgaaaaaaaattgattcattggaaaaatgcaactattgagtcattattcaatcatcaggcaagtcagactttgggtcattgtcaacaggctgcatgtgttttgggtccgtggatgctttcaggctcatagaataggtgttgtatgcatggcattcgtctccgtctgcacccccagcccacattgttatctacaccagacaatgaagaagataaaacccaatgttcagtctgggcgcagcggctcatgcctgtaatcccaacactttgggagactgaggcagacagatcacctgaggtcaggggttcgagaccagcctagccaacatggtgaaatcccgtctctactaaaaatacaaaaattagccaggcatggtggtgggtgcctgtagtcccagctactcgggaagctgaagcaggagaatcacttgatcctgggaggcagagcttgcagtgagccaagattgtgccattgcactccagcctgggcgacaagagcaaaactccatctcacaaaaaaaaaaacaacaaacaaacaaacaaaaaaaccaatgttctattgagtgatctctaggatttacatagattagagaaaaatgaatagggagagggtcgtggctgagtgatggtgattcaacccaaagcaataagagtaaggaggtcaccatcatgtagtaacacttcaattaactgtaattagtttctggagttttctgtacttgacttttaatacatttcacaggaattgaaacacaaggagttttccaaaatttttctttagcaggatgtccctggccccattccctttaatctgccttttgctgcccataccttattttttatttccataggtttttggggaacaggtggcatttggttacatgaacaagttctttagcggtgatttctgaaattttggtgcgctcatcacctgagcagtgtaccctgtacccagtgtgtagtcttttatcccttgccacctgccgccctttcccccgagtccccaaagtccaacgtatcattcttatgcttttgtgtcatgccttaaatatctcgagagattcctttgacccagtgttagccttaaacatggtttccagctacatgaaaaataaatagaccacaaagccaagattctcagctttagctctgcttcagaaatggtcttgttttgttctctaaggacagtgttggtgtcttgtagttacatctcctacggccccattaaatgatgctctcacggctgctaagcagctgctaatgttaaaaggggtacatcattgccctgcacaccaatacaccaaggttcccaagctaagcccttccttattgtgtgcctcagaagttgaacagtttaactcttcctgggctctctttacatgttctggccatcttaaagtgagggctggcactgaacttccatttgggtccattgtgaaattgcttcacagcatttacacctttccagccattagaatggtccacatgcagcttggggaacctgctgtcaacccgtacagttgggttgtggatgtgcaaattttctctggtgaattgttcgttgtcatggaagatgagtcttcttggtagacagtcaagccaagtcccttttctggaatcagctccttaatgcaattagatttcctgaaatgatttcctttctttgcccattttactaccaaggcaggtatgagatgtgcttttataataagtggtttggctagcatgcaattcctctactgcagccagccttgctgcctattgaaatggggcaaattgggcgggctggtgggggcggggggcaggggttggggacggacacgcatggaattcaggttgctctaccaagagtcatagacttaccaagctagagagggctttaagaaatacgtcatattcacaggaaggggaacatcacacactggggcctgtcgtgggatggggggatgggggagggaaagcattaggagatacacctaatgtaaatgacgagttaatgggtgcagcacaccaacatggcacatgtatacatatgtaacaaacctgcacgttgtgcacatgtaccctagaacttaaagtataataataaaaaataagaaatatgtcatacggtctaaatttctccttttaaaaatgtggccaattggccagaccagaccctgggttcccttggtctgtgtctgggtcttaatttgtaaaggtgactgttggatgatacagagaggtcaatgccatttacagaaaatttactgttactcacaggtccctagaaatgagaggcacagcatgtcatgcagggccgcaggggaagcaccagagtcgggcagaaacaggagcaaggggaaagctggggccaaagcccttattggggtttcataggaaaggcaaggcagggcaggggaaacagcttaagaatggctagtttgaataattcatatgggccttggggcataagggctattcctagtcatcctgtacccagccttgggttgatttagggcagagtaaaggctggcttggtgtgtgagctagatacagctggtggttaggatatggacttgggattggttggtctgtatctgaaagataggctcattggcaatttgtttactatctctaggaatgagctagctctgggaggggcagtctctctcccctgccaagaacccttccctcccccaccaagatgtcaaactattttaaagtagagaaaatttaaaaacataattaatatacccctaaatccctgggactcctcaatccctccccattaggccaccattcctcaccacatttgaagccccagatggaatgaaagagtcaagcatccctgagttgcagtagcatttcagacttaaagatacaatttaatcaccttttattgttttagttttttcactggtatatcaggtgtcacttgtctctaaacagtgtgacccaaggggttagcaatcaagtccttacttctctgccaaatgctatcttaggattttaagtaattcttctctctaatccttactttcttcttctgttgaaaattatgggcttgcatctgatgatctctgagatcactttcaacggtggcattttacaactctatagctgcaaccacccagagggctggaatctccttcagcagagttgaagttcatagtaactctgattttgttaataacctaaaggcaaacggtgatgttctgaatttcagtgtgtggataggtagggaaagaggaaggtaggatcatagataagtaagtaggtgaatgtttcccaagaaatctcagtgttacagttggtaatcagggctcagaaaattagtccaaggaagataactccttaggactggaagacgtggacagcccatccccttcctctccctccccatcctactcccactcccaaataaaacaaaaaggtcatctcctacatgcacacccctgaattctgttctgaaatatgtgggatacataaaatagcaaatgccgtcagatctcaagttgggcaaatacagagacagcatttttagtctcattgaaaagtagttgtcagaaatatgccattcactcagagtctctaagtgctctgtcaagctttaacttgattaaaattgaaaaccacattgcttgaaaaccaaacgtgaaatcgaaatctctttactcagtgctcttacattctgaagcctgggcttatggattatcctcagttaatttatgccatctttgtgccatacattaattttgaatatatttgttgaaaatttcctgtagcttgcatttatggttgtcaaaggggcttttatcttgaaaaaaatggtgctggttttaattacaattctaaatagcttcataaccatcgtgaaccctggatttacatcatctttatgacagccacgcaattcccactttatcgattttgtcatttgcttcattacagttaatgcaaaccttttgtacagagacaattctggggcctctctcttcttggaggggttaatatagaacatcatgaccaagatagaccccgtccctccaccccctgcttctgccgcagtgctgacccaaggaaaagtcaggatggaaaatatttccaaagtggctatccatcacaggcaaaggaaacgttagtgctgattatccaacctttctgatcaggtgggttcagacttctctgctttgaagtcctagagatagcatcactcatgttgcaggactatgtgtccaccccaccgcaagcctcactctctgtttagagaagggttgcagcagcagccacccacttttgcatttcacatgtagatcttgcaccccctgcacccagcccgcccaggggccttaggaaccaaagcatagtatggttgatggggatgtgctgagtccccgggatgtaaatgccaagaatgcctgtgagtaacctaggatggaaaatcgaaacctttggtgattaacttgaaatggaacattttaaagaaaagaacagaatgagggagcttaaggaagtataggaagacacagctcatccatttgtatccatcagggacaggcttccaagggccaggagggccaggagcagctgagggagctcagaaagctgctgggagcccaacgcgtaagcccaacgctgctgcaggggagtttgtggatagagtccagggcactatgtaagtggcatttggatggctgagaaaatagcacatttgatctggaaacaaggaatttttccccctaagtctcacttgaaaggaccttactttccccaaaccaaggcttataagacaactagcctttaacggggatataaaagtagaatgaacttgccagaaagggcagtacaagtccaaagatcatttctgaaggagacaaaggagtggggtggcccatttctaatgtaatttactggagaatgttggggaaagtcctagaaggcccattctctgcccttgcatgtcccagaacttctcagtgagtcgctccatttgggactatccccggggatggctttctcctcttcctccttcagagactgtgttccgcacttctagactctcatttttccagtagatgtgggagtctagccttcgctttctaaaagctatgaaattattgaatgctggaaacactgttgaatgctccttaaaagctgtttctgtgacaaatgggatgggaaaatatgctgtttctaagacacagaagagctgagcaggaagaggagacatctccagaagatggggtagaaggatccccggtggcccgacaccttgtgtctaaccccgtatgcatccagaagctggagagccagtcttgtcccgcctaagaactcctacgtgaatctctacctgataggcacaccgttgagggcttttaagctcggtggttttccgtggagcgctttggtagaagttaataccacattcattcatacttgtgtttttttccaccctgctgttcagccctccgaccccctggagagtcctcgtcttaactgttcaaaaccggagtaaattcacacttacattctcaatgtactgcattaaaaataaaatctgactcctcagacagtacctataacaacaaaatgagaaaaacttcatgtgaggactcagggactgaattaaaactcagcagccctgagtgccagctcttgaggggcccatagaaatcatctatttcatgcctctgttttaccgatagggaaattttagcccagagaagttaggccatagtccgacaaggtcaaatatccttgtcatctgattcctgagcaaactgtttttatttttccactaaatcacatcatcttaaaacaaaacaaaacaaaacaaaacaaaacaaaaacaaaaactctactgctggcaaatgagaaaaagaaaatcactctttcttatcccctacccagaacagtggctgtcatcctcagttcttaagtgtgaacaatgcacttatttccccttttggaatcagggaaggaattagaaatttcttcagaaatttcttcagccaattaagtagaagtagctgcaatggagagctctggacctggaagcttgtgggtagagctggcctttgcccaggtggtccccaagtaggaaccatctctgtgggccccccagatgttttcggatttacttagctcggtgagactgacttggctgctcccgagagtcctgggagaatttagagacagcatgaaggaaaactactcaccattttcaccaggcccccccaccatcccttccccaggagccgtcgcacgtccgtagcccacccagaccagaggcctctgcaggaaggggtttctggtcaaaggcacttccctcactgccctgagtgagggtaacagcctggcctccttccttgccttctctgagaaccagtctgaacaaaggcgtgcgcgcgcgcgcacacacacacacacacacacacacacacacacacacacacgaggaactcagcttctgaaatgcaaatgcaaatgcaatctactgagatatctgcgctggctactgatgcaaaaggaggagcagtggtgtggaaaatacaaaacagtggctaatcccacactattttatgctggacttgggagcctagcggtgatttttctccttccatcaagtttaccgtcctcattctctttgcctaaactgacattttcccccctgaatcttgagtgattgggagtacccccaaagcaagctgggagagagagttttaaaatttgttataaataattcccaaaaataggtgaattaaattccctcatgtttctctccttcattcgcattgctcttcaatgtcaaggtagttcttctcacacccagatagaatcaggtttgctatctcatcgtgtaagatctggtcctaggcttccctacctttcactgtgatgtcgtcagagggaaaccaccctcaaaatggggtggtctcataaagttcctgcctgtcatggaaagagcaagcttcactttttctcctttcctacggtaacattcacataacatagaactaaccgtttaaaagtacaattcagtggcatttagtacactcgcaatgtagtgcacccatcacttttatctatttctttttgttttttttcttttgtaagatggagtctcactctgtcacccaggctggagtgcagtggcacgatcttggctaactgcaacctctgcctccgaggttcaagcgattctcctgcctcatcctcctgagtagctaggactacaggtgcccgctaccacacttgggtaatttttttatatttttagtagagatggggtttcaccatattggccaggctggtcttgaattcctgacctcatgatccgcccgccttggcctcccaaaaatcactcaagactcagggggaaaaaatgtcagtttaggcaaagagagtggggacggtaaacttttgtctatttctaaaacattttcatcacccccaaaggaaactctgtacccattcggcagtcactccccattccctccctgcccccagcctctggcaattgctgatctgctttctgtttctatgaatttacctgttctggatattttctattcatggaatcacacaatagttgaccttttatgtctggcttctttcacttagcgtaatgttttcaagagtcatccatgttgccgcatacatcagtacttcattcctgttttgtagctgaatgatattcctttatgtgtacataccacaattcgtgtatccactcatccgctgacagacatttgggttgtttccaccttttggctattgtgaatggtgccactatgaacatttgtgtgcaagtttttgtttgaacacctgtttttaattcttttggctatatccctagggatggaattgctgggtcatatggtaagtctatgtttaactttttgaggaaccaccaaactgttttccacagcagctgtaccattttacattccctccagctatgtaggagtgttccagtttctccacatcctcaccgagcacttattgtttctcattattttaattacagcctttctagtgtgtgtgaagtggaatctcatgtgatcctagggctttttactgagcacctcctgtgtgccaggcactgtgggccaggtacagtagtgtgtaaaacagagactgtacccgctctcctgttgctgataagttcaggcattcattattccttgaaagtaatagtaaagaaaaggaagctggcctcttctagagtatttccatgctgtgtattagctagatcgaaagcagctatcagcacagcacgtgctgctgagttttgatgctccttttttcagcagttaattacaaggaccttgatatcccccgaacactgagcttgcaagacatgttttaattggcttctgctgccacagacatacctttgagtgatgcctcgctaatggccactcaccccgaacaccctacgacacaatctggttactgctgtcctgttcctttggttcccgtggcttgtatacctatggaagacaagccttgtcacctctggggaaggccatgcccaggaatgatggcttcgaatctgcgtaatttaccacttttgcctggagcaaagagaaccatttctccggagaggccatgcctctgcccaagagagcactatgctgtcccagcctggtcagaaggccacccattggatcctactaggtgatctggaattgaagcatcctctcaaggtgcagacacccatccatgatcctcagtgactggagctaaaatcagttaccattcccagtgatcctaaaagtcaaatggactgggactcccaaggaatctgagagacaaggaggcaatggtggggacactgttgagtgtgctgctccccccaccccccaccctcaacaccatcttctgggtaagaatactttgcaggccaatgaaagcaactagttcccagtgacaaatactgagactaaagcttggcttcctccccatcctcttcccaggctacaataacttgagttacacccacacagtcatattaggctccctgtctttgtattttgaaagtcagagaaaggtggaatagcctgatgggtaagccccgagactcctggattgggaaggcaggtttgaacttgactctcccatgtactagccgagctccttttttgatgctacataacaacctctctgaacctcggttttctcctgtattcagaattcgtcctactctctgaagtaagtgcttgaatgaagggatgaccgaagggccctgagagcttggaaagagcagttcattttgcctgagtttgtacaggaaggtctcctagaagatgtggcctttgaggaaggccttgatgaatgaggagggatttcacaaacagggtagggggcaaggacaagcataagtgaacgtggaaacatgaaagtacttggtgtattcacatattgcacagagggaggtgtagcaatgtcatgctaaggagtctgggctgtttccagaggagcagcatctcttacagtcatcgtgagcatggacagaactgggttcaatgccaagtttagagacgtagctctcaatgcctcactttcttcttctgtaggaattattgtgagatcagactggcataagacacttaaaaggtgctcagttcaatactggatgcttagtaagtgttaaataaatgttgtgtgcaatcattatcatggttgtgatggttttgtgattgctacaatttatcatgtgagccacagggagccactgaaggtttgtgtacagcttacggaatgttaagattaagaacttatatgccatagatggtgcggcatttgactattttaggtggtacattacttgattggttattagttggaagtagccaccaagaaatgagattaaattttgcaatttctctccttagttgtgtcaactatgggaattgtgaatatgtgcacacattggtatccttctttcagtaagggagcaatttgtattttctttggtgtaggtttttggtggcttcttgtatttcaatcttgtaatagcaggagaaatacaaaaagcatgtgagtctgaactgctgcccttagtccagaaagaatatattgaatatctcaaataatagattctttggtctgggatggaagaagaagggacaaagagataggttcaaatcacagaagggtctaagttagatgaacaagaatgtttttagaatttcataagaaaccaatttcaggtcatataacttcagagctgaaggagagcttggagattatgtaaaaaagaattcctaaatttaatattacttgttttaaagcaaataaaattaagtaatgccacaaatacattttcagagtgcacacacttcattaatacacaaaaattccttttggactaaatgttatctgccttttacaactgagactgaggggcatggatgtgaatcacttagtttgcatagttacaaattatacaagccctagtcttccacttttataagaaaaaaacaggtagccaataatgagagccttcaaagggttagttagtatgggctagaaatgtgaaaaaattcaaggaagtcttaattttcttgatgagtgatctatgtgatgtttttaaagggaaacaaagatctctcgaggctgaaggagatgatgtggtttcagtgcactgtcagggagcactccccaggatgtgccgatttgtgtcctcgaccctgagtggggatgtttgccatcttgtatttgaatgaaaactaacatctcacctgggcactgacctcctatccaggaagaaatgtctcagctctggctcttgcttagtggtcatattcacgcagctggaatcatttaatctttagagcccagtgggaaaattttctgaaacccccatggggataaaaagaaaaaaactacctcactacagtttgtgctgggtgatttagaaaaacagagtaaaaaaacagagatgtgggagataacttttcatgcccgttaacaaaagcacatttcatcttcccagtttctcgcttcttcctccctcctgcgcctctgccggggaggaaccacagatggttatcgctcaagagtgtaactagggaaaccataaacctgcccccatcactatggagacagccatttatttgtccagcctctgagtattcatgacatcagcaaggccggcaagtaaaacactgatacttcttacaaagaaattctaattcccaacgaggaaggcagagaatgcaaggcccaatgtttcagtgactttcaaggctccccctggccttgtcatgggcttgtttgcaaagagacagcccattttacagaagctgcagtgaggagccttttagagccaacagaactgaaagctgggtttgcgagtcaacagacattttaaggtttagggatatggttgagggaatgaaatgccaagaataaatctattttcaactgagtcagccccatggggtataacagggtaagcagccatcgcagttggcctggaattgatttgtttcccaggatcgaacacaggagtttcaatgctaaaacagggaagtcccatgtaaaccttggggagttgggccaccgaggtataaaaccctttggtccaaacatggggatgaccacaggatgcaggtagatttgaggcaagcctcaaagtgtgacagcacattttgcaaacagtaaccaaacttccttggtcccctcgtctaaaagttgctggaaaacaaatgatactgtctcgctgtgaatatgaggtgttttcgtttgatttgctttggatttgtttgttttgttattgttgttcttttatttatctagaaatgccagaaatttgtttcaaatttaaactcgccaaaattaagtgggatctctgcttgtcccccgtaactatctttttttttttttttttgagacggagtctcactctgtcgcccaggctcgagtgcagttgtgcgatctctgctcacagcaagctccgcctcccgggttcacgccattctcctgcctcagcctcccgagtagctgggactacaggcgcccgccaccacgcccggctaattttttgtattttcagtagagatcgggtttcaccgtgtgagccaggatggtctcgatcttctgacctcatgatccccctgcctcggcctcccaaagtgctgggatcacaggcgtgaaccgctgcacctggccctatctttaatgataaagtggtttgcagggatcttccccctgcatttttcaacacaaattcatttgccaaaagcccaatatacaggaaagtatgtaaacacagaagtggagttattgatatttcccagcgatgtgtaaaacacctctttattctccaaggtctggtgtgcctctttgtggctaatccatcatcgctgtttgcattattgcagagcttgctttcaggagcatctactggagtggatgcagttattctcctgctgagaagttgcatatgttgaacggcattatgatctatatgaaatagaaggtgttatgctagctatgtggcaaagtatgcataatgacatttgttgaaatagacttgttcaatttccaactaagttctaagcaggctattccgatcagagagcttaattaacctaggactttgtcctttacaaagtagatttggttggttgaagtctttggaatgctaacaatcaattatctaaatatctctgtaaatgtaactggctataccacattaaacgtcagaggtcaacaattgctttaccagttatatatatttgtatttacatggacacaatattacatgtaactacatatgtaggaaaaataggcataagagttgtcagttttatagacaggggtctttgtggatacttaaataattcatgaatcagtaaacatatctatatgtattctagggtctggtgggcaagtgtacaaaatgagcaaaatgatagattcacctccttttgctcatttgagatgttgttttaatgtagaattacagtagccctcaaatgatgagaagcagtgacaattcattagcagattgtggcttagatcaagtgtttgatttctctgaggaagtgtaaccagtactcagttatatgaagtatatgcgtttcttttgaagataatttttttccttttgtcagttaaaataaccttgagctttatttttttcaaagaccccagctagcagcagacaaatgcttctataatttgttcttcaataatgattttttagaatgttaaactgtcataaaaaaaaacaaccttcaaaagcgcttctagatttcctattctctgcttaaaggacaattggataatagggaggaaagaaatagcatgtcaaggctgcttcacattttgtcttctgccttggttcatgaaagcagggattcccctggttttctttttacagttacaatattctatttctcctccgtctagaaaaagaatacttcaaatatgtacattgatgaacatatatatatttcatcaaaaactaattcaaattattatagtttaggtgtttaaattcccttaaacctttcagtataattcagctgtgaaaaccagaggtggcaactttcttccaaatattttcaaagcgtgtcttatactttattcttcatcctgagtacctaagacagtgtgaacatctaatagtactatgttactcttatgggttaattccttgttggatttcatgactgttgacttgctttgggtttctagtaaggcttcccttgtgaatttcatgcagaagtccccacacttatttggcacatttggtagggatagatttattcagaaattagcaaattgttaaactctaaagggtgctgagccttagctacttctcccatttagcatgaggaggaacatgaacagaagctcagagcagaacgctgctgctggatttggggcctctggagggacagtgccctcaggctaagtttaaccatccacctgatgagatgctgggcccccagaacatctggatgaggaatgaacaactggatgggtatcccctgatgtgcagaccttgcatgtagatacctagtttggaattcgacttttcttccagatacccaaagcctatttctgaagatatctattttcaaggtattcttcatggggacttaaatgcatcattgaaatcctgaatttaaaaaaaattctttttcttttccttctttctttatctctttcttctttttttggttactgttgggagatagttagaagctttttaaattgtagtcagttttttaaccctttgtaaaggatttagataggctgctttaatttctgaagcacaaaaacatttctaatcctgcttcaattacgaaatttcacattgtaattgaaagagatgaactgtgataataggagtatattatgcttactaatgggaattctttcaaaagtgctatctcccagtctgccgtttgcggagattattttaagtcctcactcacgctggctttcctttctgccttgtttatattctcagagtataaaaatacagtagtcagaaagctgctctcggggagtctgcatttagtgcttgtcggaggattcctctctaaatggactctggtatcattttagcactcatattgtttgccgaaattcgagcttcctggggaaattagagcagttaatttaatatcatgaaacattttggggcttcttggcttattcagagacaggggagtgtaaatcaaactgagtatcctgtataaagtagaagacaataaaagtggcctccaaaaaaatagccagccttcccaaaatttcttgccttcccgttccccatcttcatcctggacccatagaaatcttgttttatttcaagtctccttcccaagggctccctgatagaggtctgtgtctcagaaagacaagaagcagggaaggtgcttagccctgtacagtcacagcaggagggctcagtctttattgtcgtcactagaagggccacagggccacagtcatgacgatatggcttagagctttattccatacggcttgggctcagccctgacaccttttcctagaaggactcattctgcaaccattggtgaccatctgtgaagtggctggcactgcgctaggcactggggtaagttatgttgcatgataagaagcaaagattcagcagctgtgggaaatacacttcttatggcccaggaaaaattgaaagagagctctcaggcatcctccaactgctgggttctctctgctcacatttccaaagccctttttgcagatgcctcccgagtgatagcgtgcatgttgcagggtaggcaatgggctttgttgatttgtttttgagagggtctttgaaggaggcctttcaaaggcacgatatggacctttgacctgagagctcagaatacacatcagtggccccccggtcacatcaaaccccagaagcaaactgctaaatcgaatgttttggcctcagcttcggaaggttctctgtgtgtttagtaacgctccactccaccatcctcaaagaaatgctgggcttgtgtttattttgcctcccttctcctgtgcatcaggactaacttttatgtcgctgaggtgtcattttgcaaagaaaaagaaacctgtctgaaccaagtgtgtatttactttgttttagagacctagtgtatttgcaggaagtatcaggaatgctcatggacaattaattgggctttttacgaatacgctgatgctcggtgccatggagatgtaagagctgggaagtggagtaaccgctgtggtttttgtttaccttatggggcccccataggtgttaaacccttgaagaccctggtaatgaatgtggcatcttgtcttgagaatggctccttgaccatcatggttggaatatcctgtctgttttcatttatctgtggttagaacaaaaggagacaatctcagttataataaatgtcttctagaaaagcacacttatgcataaatattttaaattttgatgtttcgtgttttaaaatagtctataaaatacacccacagagatgcttatagtaaagctcagttttccccattgcaaataaacttgatgtcaacttgtgccacccactgaaaatatttaaacgtcacgtaattagtaacatattagatgtctctgcttttagcctgaaaatgatcagagccctctcaaagactcttgtccccaccacttcagtttgctgagtagcaggactgtgatgggatatttactagtgtgtgtttagtcttttaaaaaaatcttttggctatctcccctcaccacatactttttttattctctttctcccactttggtttattctcttctttctatggcattttcttcttccctgcagattccattctttccacataaaattctgtacatgtagagtctcctgtttgatttctggtgttctcaaaaagaaaaggaatagaaaatgcttcacaaatccagtaaataaataatatactaatagcaaggacctttatgaaatgtctgcacgaaaaccaatgcaccacaaactgccatctctacacaccccagacttcccaatgtgatgatttagatccttttctacttaggcggatggtgccatttttgccgaattcagcatgttcattgaacagtttctcgaagccaaaagccaactccactgcatttctgcttggtaaggtttggtggccttggcgtggggtagaggttgttgattcaccggcctctaagctgatgataaatctagaagctgggcagcaggactagactgccttcatagaacctctgcagggagtcggcggccccaacactgcaagaaatctatgaaaaagaggcttagcaaacccgtgtgaataaaggctccagaagaattaggggtcgagaagatgtggtgagactccgtgtgagtgggcatcagtgagaactttgaacactagatacagaactcgccaactgaaaatgtgcttctgcttctcgagatgcctgtggactgtttattttcttagtctaaatatctaaatcttctatcatgagcatctattgagatgatgtattaataattgtccataatatcgtgacagagtctgtctgttgtaatgcacggtatcactctattgcgttttatttgtgtgcatttatgcaattctacatctggatacttatccaaagataatagtattttaattttaatcttgccttcagtagaaaataaagccctggaagagggttcccaaaggtagctttgacatgtcttttgtggagagttgtcctgggatagtttagctcaatttacacatgaaaattccaacaccaggaaatccctccacctgagaggtggagaagattaaaagagtctaggagttttttagtacagccatagctcttttcacctgtcctgcagccccaaagaccatagtgtgctctgcagaccgagtacaacaatctggtgtcaataaccaattcctgtataacaccttttttgttgttttttatggttttttaaggaataaagtgggttatgtatgtaatatatgctattatagttggggtgtgatcatggttgatatcctgacttacacattatatatattttgatttaggaaaaaaaaaaccctggtatctgtgtatgatccctcaactaaaatagctcagtctccaactagaatgtatattagtcaaggcatctttttaagagacattattttcatgctcacaggatcacaggatggaaagggaaattacaaaggagtctggaaataggtgcatttaattcttcccaatttaaatcaaagtggtgcatctttaaggcaataacgatattccttcttcccctcttcatgaacgcttccatcaatgaatttctttaatgttgatgatggctggtgcagtttgagggaatctgtatttagtcagaaaatgcttcaatagaatgacctaccagatgggccccgtaacaatgcacagaggcatcaaaccaccacagacatttggtgcttagaataataaaaagactataaaattagattagttgagtctaatttggaattggtatattccccatgcacccttgccgctcttgggtagataaagccttgagatttagcactgtgtcagagcagaagactgcaacttccagtaaaagggagacgggggaacgggagagaggaaaaaagcattctgggaggtcgcggagggcagagcagtgacctccaatgatttacaggcctttagcttaatgaaattgtttcagtgacatgacggtaagagctcgtaatggattggatgccctaatgtaatgaaattactcccttctgcctaaaaaaaaaaaaaaaaaaaaaatgcgcaattaatatttactgagacctgacagccttttggtgcgctcgtctgtgtagttctctcagacagtcagagaggagagacggagcagcgtggcagacaggctggctctgcacgagctcctggcggggaccagcagcgcctgcaagggggtggagggacaggcgctcgggtggcctgggccgccggcccctcacgctgcccccgctcagccttcatgctctcccctgcttttccacaggcaactggacaacaaccacatcagctgcattgaagatggagccttccgagcgctgcgcgatttggagatcctgtgagttgattttgcgatcgctgccttgtgtgtgcgtgcatgtgtgtgtatgtgtgtgtgtctgtgtggggaggagagagggggagagtgtgtgcaggagggtctgtgtgaatgcatttctggtctctgctgcagtgctattaaaattgggaaccaggggatccctccggctcaccttggtcaaagtgtttgcaggcagccaagtgtgatttcttacctcccacaaactgaggttcctgctaattaagtctcaattgagtctttctccttttcccccagtgctcctgcagcattcgttgctgggagaaacagatgggctggagcagaaccccccagagcctgccacagcatcagggacagtgtgtttgagtgcgggcacactgggagacaggggccggggttggggccagagagaggggttagtgccaggaggtcagctggaattacctgaatcagaaagggaccttggcacagggcaggggaatgccacacagcctgggaaagcccagtcattgctattgctcctgggatctcatctcaggcttcaattcaaactttaaacagtgaccgtgaccttaaaggggccaggggtaggggggcggggggcaggaaatagggggagatgagaggagacagccccttccccaaaatcctaccctatacaccttgtctagaaagaatgtgtagctgcctttctgagctctggattttcaaatgagtctaactaagaaaacctaactcccaggaggaaagtcagctaggagtcatcttggggtcattccaactaaagttgaattgtgtaagaaaacattttggttattctcaccaaagctacacttctagctgtccctgatttagagaagcccagagaggaaggcagtacagcacaggagaacctgtgccacttctgtcaggagacgtgtggttgagtccggattctgccactgattagtcgtgtgaccttgggcaagtctcttcggctctgggagcctcagtttcctcatttgtaaaatgaaagggttggttgctctgtcttgggagtgacttcccctttccaaattatgtagctgcttggttctaaaaataattcccatggtacgattctagccagtgactgatagcagagtggggtttctcaagcctcctcctaaaaataaaaaattacacagtcacaggttacctatctctgattccagaagaatcaatgaatgccaaataaacaggtgaatgaatattttgaagcattcctttgtatgtgagagaatgagtgaaaggtcctccctccaccttcctcttcacctggccccgcagatactagcaacgggttggagagagcctctccacattatttgagaggaaggtgattccaagaggaatcacgggaaataaaaggggatgctgatgctgcaagctgcttgaaatcggatgaaagccgagaattcccggtccagaaaagacaggacccacagccagggaggtcagattgtcatttctgagatagattgtctctcctcactcaaactctgaccctggaactggcaacaaatgcccgtctgccagagagaggatgccagcccaaatttagtaacctaggactcctcttatcaggaggctggggctgagaagggtaggcaggattttccctgcctgcaaaatagcatttgtagaaagggctgctcacagcacatcacctttttcctcccttgacagagagaatgagaaagatgagaaaattccttgggaagagaccaggaaacggaagtcaccagctgccacgaaacagctgtgacaacctgacagccctcacggtcattctctgtgctaggaacggtgttgtcttacctcaccaggaaggcagtctgagggagaagagagggctttacagccagacacacctgggtggggcttgggtcaagtgtcttcatctctctgagtctatctccccaacttttaaaaacagacagtgtatgtactacataggaggggctctcataactgccatcccttccactttcctaactttgcccccatacaccctcacccccatcaagcccttgcccaggacagatttggacagctctcctctactcagatacaaaaaaaaaaaaaaaaaacgaaaaaacggtatccagatgcaccaggtgtctccaagttgaagctttaaaaacctgtgactgaaagaaaaaaaaaaaagttctcattccttatcattgcaaagagcccataggatctgattagtttatcttctcaattccaaacaaagccagatcaatagctttgttttaaagacactctcatttggcttcacatggctaagtacttaaaattaatcataatcagttattccatgggtttttaatttccagcagaggcacacagctttgaaaccatccatcttaatggtgagccattctgaacttggctggagctgacatctccatttaaagaacctcccctccccacccctagaccttccaaatctcatccacacattgacattttataatgcttctctgtaatcacaatttaggctccataaagaatcctgacaatgaaataataaataggaactcagtgacagtattacacattagcttgataaatttctgagtgaaagaggagagttcaaaacatcctatccccagaaagagcattttaaaatatctaaagcttaaaagtctgcaaattaagaagacaaaatgtaatgtttcgggtatgttttctctgacattaggcagcatgaagtagaaatcaagcaaagacacattggttgtcccagaaagctctcaaattaacttaaggaaagtgtatggatgtcaactgcaagtagaagtatttcgcatgcaataaccctgttattccatccctcctgtggatggaaataccataaaacttctttccatcgaggctgacaatggttttaccagttacattgaatgagaacattggaggtgagcctgagagggaaccactgactatgtatgagaagaaatgaactggtacaaggttgggaaagactgaaatctgcccacttcaacctcatttttgactcattcccgatgggggatgtccagtgcagagtatggtggacagggaaaggagccatcccctcccctttccaggaagtaagaagaaaagcatagtatcgggggcgaaacttctcattccttccatgccactacggaggaggaataatgaggaaaatgaaaatcgctagcagttactcaagcccagtgataccaccagtgcttttacatgcactagctcttgccatcctcacaatctctcaatagaactactgttaccctcaccctgcttttacaaaaaaagtagcccatctcagagaaggcaagtaactgcttagctaattagcagcagagtctgtgtgattaaccattctaccaagctgccttttggatgcatgttgccaaggctgccatggtgtttggctgccctgaagcatggcggctgtgggctgcagggtggtgtgaactggcctcaagaactgatggaggcaaactagcaatgactcacaatcccgctggggagaatgtcggagcctttcacaggcttgtgaaattggccctgccattccctttacccagttaacgggtgcccacaaagttgaaggtaaatcaaacttgcaggagtaaggaactcgtcctgctttttcactgatacacttgtcgccccagagatgatttattcccactcgtggccattgccatagactttggcactccacagtttgggggctctactttctagaactgtctccccctcctaaaaaaatacagcctcaactttgtggcatttaaggttcttaattgagggaccgaggctctgtgagtcagaccctctgctgttactcaaatcattgccctttaatttccacctgttctatgcttttggtaattcgcatacaacactaggttttctccaagtaagtcgtgcttatactgcagttgaatatgccaagactgcattcctggctctgtgtggtcaggatgcactgtgctggtgctctgagccctgggtttctagcccataccagccaggctgaggatggccaggcatttcaccagttatagtggcacctccctgactaacgtaccatcatgggtcagaaaaaaaaaaaaatgcttaactctaatgaaaaaaaaaagtagggacaagttaaacaaaaatgagaaaacctgattaataacatatgtcatgaattgtttttcggtagtattatgggagaataaaaaatacttttggacattgtcccttgactaaaggtagcaagtcagaagttcaataaatacgttgtcaaaaatgccggaccacagataacagaaacacatcctgaaaatgctctcatctcctggtgattggtctgcccttgagaaatcactggtgccaggtaaatggcatggagatcccaacaggtccatagataaccggcgtgtgctgtttggaagctctcactcccatttatgtcacttgccaattttggaaattcactgacattattataggttggcgctggtaggaccttaggtgtctccaggatgacctctcactgtccagattaagacccagagagcaggcactggagagaggcccatgccacctagcattctgcaccctgagcacctcgcctggttcaccctaggcctggccctggctaggagacttgcctgaagtcagcagcaagttggcggtaacaggggaacttagaatttgggactcctcacccgtgtttctgtccgcattgggcacctatatgcaattgttcagaagggagcccctggtaagattgggaatcccaagcatagttcatcctttcaaaacccaccattaagttttgggtattatttaggagactgggggagggcaaatgtttgtctgtgacagaaacaagggatgatccggctcttagctctctttaaaccggaggctacaaactagaccacacaccatattgctcccataggtgagatttttcttttgtcctgtggaatgttttttaaaaattgaaattagcatttcacatttaaaaattgagatatcttacataaaaagcccagatttccagcttctctggaaaaactagaagcactggcaactgtgggccggcatttctgcattgcagtcagctgtggctggggaacacctgtcctccttggacggggcatgtagaccccactctgccactgacccctaccaatttacattaactgccagcccacgtggcccctgtgctgacccatccaagaagaaaagacacgctgtgtggccagcacagtgctgggcgctgggtacagtaaagcttgaagtgagcaggtgcttggcaggctgagctccataggccagagctcaccagcatgatggagtggacacacagagagagcttagtgatgtggagtccaggacgcccgaacctaagcaaggacaccccagaggcaatcacgaatccctcatgtctcaccttctgaggagctcttctcaagggttaaactagtctccaaattgcctttgatgttacagcagttgtaattggttttatgcctatgagggtgaaaaacaagaggtgaccctagctccacgtcttcatcacaagagccgccccacctgccctggttcttgttccccaggcccctggatcaactggtgtactgaggccaccaagcccacgtttagagaggagagattgaagagttaaagcaatagcagaactaaccagatttttagggtagttctaattcagtcatatcctggtgggttcaacgtggcctgatgcggaaccccacaggtagacgcagaagagtgaatggggaaaaggtcattttctggtacaagaggaaggcagtggaaaaaaatcgacagcagtcctgaaacctaggtcagggtgtgctcactctcctagagcggggttggtgtcctggtacagggtgttaggatattcaagcacgatgttgcccacttcagagaacccagagtttaatgcaagtcgcagtgtgttggccacttcagctgagcttcctctggatgcagagccagaggattaacgaataataataatgacgtaacgataatatatagtaccatggtacaataattattagtatgattatattatcttgttagagtcccatgtttgagcatctactatttttgagagtctacttctatttttgagcatctttaggtactgtgataagtcagtagaatgaggcatctcaattaaatcttcaccacaactttatgaggcacatcctaggaactgcatttcaccagtcaggaaactgatgcttagaaaagttgactgacttgcccagagtcacagtggcaagtacgaggggactactctttccgaactcagatccagttctgcctgatatctgagcacctgcccttaacaaaaataaaaattaaaattaaaagcacctaccggaacacacatacatagaaacaattatatgcactagtgagatcattatctgtagtgaatgcccagaaaacttcagaaaccatagttattgaaacactgacccttagggtgcttagatctaaatttatgacctcagcttaatcagcaacagatccagttccacaaaactgccccagacataaaggtacagagccatggttgagctttggaggggttagagtcctctcatagaaccagcttccagctcatctttaccagactaggtggtttggagttcatttccttattgaaaaatggaaactgtaattcccaaccctgagaatagctgtgttggttaaaagagatatcgttggtgtgtgcctagcaaatagcaggctcccaatcgggacgctcataataagtaaagctggtaaatacttctgtactgtttctctgctttatgtccacatctcactcactcctggcacgtactaagtggccggttaaagtatgtggaaccaaatcgagttgaaattaattaactgaattgaagcccacaacaccagtctctagagtccctgttatggcttgtctctgaagagaacaagatatggttgtcctggaatcattttaaatgttgaacaacgtagtattttactgaaccagtccacttttcacattacctttgattttgcatttctctggctaaatggtgatctttctttctcattttaataaggaacaaaatcggagctacagtgaaaattggtgtgttacagcagagactagactcatttttatttatttataaaatgtttcacctgggtttctctgggagctacaaacattttatcagggtgtttagtcatgacatagttttgaatatagaactgtcatggcttaatgaaagtcttaaaatatctccagatatttttcttttggtactgtgctgtaaattgtgatatgttcatgcaatcaggattaaaattgcactctatagaaagcatctgtaacttccattcagcccctagaatactaggaaagaaactgggttttctataaatgctctcgtgccactcaacacacacctccttcttagtcatccagactccaggttccatgacagtcatgctcttcaaatgactagcttggttttgagaaccccagcttaaggaaaaagtaaaaattactttgaaatctaaattttttttttccatttaagtaagtagcactttcacctttaaaatacctggaatctgcgggaaacttgtggttttctagttgatttcactttcctgttaaccaaaagctagtttcatctctgaagttgaaaatgtattggtgtacattcctgggttaagaggatgtggagaagataattgaattgtttttgatcagcaaaggatcttgaatcaacgaacctcctgttaacttctcccgtgagtagcgcttagggggagtcggcaagtcgtggtggtcttgctgtccccaggggccacacattccagctgccagatctctgcactggaattcagacttgacaaacttggtttgggagcagtcttttgaaatgctttgtcccacctagaacaaatgggaaaaatagttctccatgtttggagaaagattccagagagttttctttcaagggcaagatgtggagggcaggggaaataccgtagagcagccacatgcctacagcggtcagttcactcctaagaccgggcttctgtgctgatttgcaaaggtgcccctgcctgatggtcagcctctgccctttcaccatcccctcagctcccagcaggggctttggtgaccagtatttgagaatgtttagtgaataacttgcctctagatcagcgctcatcccatgacactcatggacctccaagccagggagccttgttcctcttgaacagccaaacctgcctgccacagctgctgccattcccaccagggatgcccaagattggacagctcagcttacctgtggctgagagtctgcttttctatagacctgagtcttgaaagtcaagatcctaggagctttcacaggaatttggccctctcctacccactggcttaatggaaggaaggatgatgtggagaaggtgatggagacacaaggctgggaagaacaggatcaacattgctacttttccctgagctttcattttctatctttgaaggtattaaaaagtaagggatggaccaggtgaagtagatcatgcctgtaatcccaatgccaaggcaggggcattgcttgagcccaggagtttgagaccagtctagacaacatagcaagacctctacacaaactaaaacaaaaacaaaaacaaatttttttttttttttgagatggagtcttgctctgtcacccaggctggagtgcagtggtggaatctgggctcactgcaacctccgcctccccagttcaagcaactctcttgtctcagcctcctgagtagctgggattacaggtgccagccaccacgtctggctaatttttttgtatttttagtagagacggggtttcaccacgttggccagtctggtctcgaactcctgacctcaagtgatctgcccacctcggcctcccaaagcgctgggattacaggcatgagtcaccgcacccagtacaaaaaacaaaacaaacaaacaaaaaaacaacactttttttttttttttgaagtaagggatggtggatgaaggagggatgaaggaaataatgactccatttctccaaggtcatatttggattcttcaaactcattgtcaaaaagctctagagagtccattttcttttaacttgtaactaaatcggaggactccaactgctggcccatgggttgaatgaaaacagcagatgtgggattttatatttttctttaatttttttgtttacaaataattagaatttgttgccaacatttaaaactcaagtaattttatgtaaaatttataattcaacttccaatgaatatctagaaggtttgccaaccctgggcccgcctgtggctaggatctctccagcagcaccgtccaatagaactttctgtgatgagggaaatattgcatctctgtgttatccaggatggaagcccctggccacacgtgactcttgagcacttgaagtgcatcttacacaactgagaaactgaatttttaaatttttaattttaattgattccagtgtgaattgccacgtgtagctcatggctaccttattggacggtgcaagctgggagcgaagtgtgggtgggtaccctgtctggacagggcatgttctgcaaatcaccatagctcccaccaggtctgcttccctgtcctgctccaaatctctccagccatttcacatccattaagaatgtttaaacagtgtcttttctagcagtaaatctttgaaatatctgccactcccctcaccttccacctccatctttttttttttttttttttttttttttttttttttttttgagacagagtctcgctgtgtgtcccaggctggagtgcagtggcatgatctcagctcactgcaacctccacctcccaggctcacctcctgccctcagcctcctgagtagctggaattacaggcatgcaccaccatacctggctgatttttgtatttttagtagagacggggtttcaccatgttggaccccccggtctcaaactcctgacctcgagtgatccgcccgcctctgcctcccaaagtgctgggattacaggcatgagccactgtgcccggccctttctccatctaaatttaagcatctgggtcttatacccacaaaacacccatttttatccaaacctgggagtgtgatccttacaacaatggcccaccaaaaggaagccctttcagtgtaaattcgttccctgatccccattatttgcttctcacagccttgcaaatgacttccacaaagtcaactgggtaagaaaatcactcccctgcctgagcccttcctgtctccacaggtatactagagatgcggcagccggttagggaaccaagcccattaaccccacagaagctgagccaggtatttgcataaacagagaaagaaaaagagccggccctgcctcactgttttcacatgctgcacactgggggctagttgtgacttccagactttggccagatgtcctgtctgtgcagagctgggcagatctgggcatccatgaccacttcttctaacatctggaaaatgattcccaatccagaaatgctattttagagccagcacaacccaattggaattagagagtgaaatttaggctagaaagaccctggaggtcagctggttccaccacttcatttaaaaaaaaagaaactccctcacaaaggttaaatgacttgcccacagccataggaaaaattcgtggaagaaccaggccagaaagcaggtcttttggctctttatccagttctctttattgctgtctgcttgcccctatattagcagacaggaaacaatagtaagtgaagccagctttcatgtcctgttcatgccatcaccttttaatctctagcattttgctagagggaacgttttgcattcagcatgaggacaacaccctccctttctagggccttccaggcctttggccactgcttgggaaatggccactctagtgcccaatagattgtccagtcagatggcagtctggaagagaccagattccacatcattgatccctggctgccagggatgaccagaaacccgttgagtaagcactggagtcccctgcccattgctgagcccagttagcccaagctgtaaattgcactcagcttcctgggagactccctcccttgcaaatatcagaggataaaaagcaggacctctctggcatctcagcccaggaacagagcctcatgcaccctgtgcagctttttctaacagctctgaagtggctcagtttcgactgtccacaaaaagtggcctatatgtttggccacagaactaatgagtagcatgcaaaaaccagacaagagctcacctgcctggtggaaaacagtcttacctttagaaacagaaacttattcagggctctttgtccccaagtaatgatggttgtggggggagaaacaatgaataatttacaatcatttaaagataattcatcactggtggctgccctttgggagttgcagtgtagaaggaaggtttcaactacatttcaccataatgccattgaagcactttgattttcttactatatttttttctgatttaaattattgaatgaatttgtttggttcggagaccaaaaactggcacctgcaagccagatccagcccccaggtgtttcatttgtgggttttgatactcaaggtgttttagctgccaatattaaaaaaccaggagacctcatatgaaaattctagacgtctggctttctctttaaaaataacaaaagggaagaactggcaatgctgcacccccattccagcataacacagtctcttgaaacaagaagtgacgatcccatttagtaaggctgggtttacgacagtccccacgcagctcactcacttatatgacaagcctcactcccgtaggcaattgtgtttgtactcctggattagcccagaaggctgttcagagtgggaatttatttgtatcaaaagatgccaaaaacctgactgttcatgctttgatattcgccagcccattcagtaaacagtgaggcttcctatgtgccaaacactgggccaggctctggctacgtaactacatgaaacagacttgctctctgcccatgcctagtatacacattcatggatattttcaaaatgtccctcttcttcctctcttactggctaggcaccaaatgcagctgaggtggaaattgcctgtttcttcccttttcaactgcaaactcacctgtccagtaatgtaagttggaggtcactcttgcatctgtggacacgttggcaattgcctgatttctaagtcaagactgtccatggtctcagtctgtagatgatgaaacagaattgggagaccaaggccatctcattcacatggtcatttaaagtacattttaaaataaactccatcattggaaggcagttgagccattctgaatcactgctaggcagtatctgtgatcatctcagtaaatgaataaggagttcttcggagtcaagggacccccaaacacaggatctgattgagtagtgacaggatttgaggatttatctttctcttttgatcttccacttttaacatttttcggaggtattgtttttctttgaacaccgaggctctgccgagtggatggagacgaatttctgcctgtcataatatgaatatataataaaagaaccaaagacaagcccttttgttaaggaatctgtattatcaaaggcccaaattggcagctgattgtttttatttatttctgtaggttttacatgacacctggagaccatttaaaatgttacttggcggtgagagctgtgtgtttaaaaataacgctcacccggtgccaaatcactttagagtcgggtacaaatattgagacaaaaaccccagctgttattgctttggctgctaatttgaggtgtcaaatgagagctcgactgctatacgtcagtgaataaggccccttgtgagatcattatgttttctaacagttgagagtaatggactaatcagtgcagcatcagttgttttcattatatgcccacacaatggttatgagctttaatttaaacggtccacagggagatcaaggaactcagtaatatgcagcacccaggatagtccaggaaagcaggtaatgcgaaagagatggcttcccacccttgtctcacctctccctccactctcccccacccccaccaatctctctcactcctcccgcctcatatgcccttggagacccatcgcccactccaaacaagcaaaagagaagctttgcttaaggagcaggcagatctgtactttctattctacagggtattcttaaaatttccagtcaacctatccaacagtaagggccactaggcttttggcaacactgatacgtgttagccaaactttgaccttagacgcctttgggacctagttgtcctctgtcctgcgttgcctctcctgcttccctcactgtctgtgctgagctgtccctgctccttggacaggaggagggctgtctagtgctgttgccttggagcagcctcagcagtgaggccaacaccatgttccctgccacttctgggaccagtaaaggatgggtccctcacaaactcatgtgattcacctccaccttggaaaaatgtggaagctggaaaggtgacatctgtctgtctgaagacaatcctgtaagaggcagttttgtgtaatgatgaaaaatataggtcctggtgtcacacctctgggctttgaatattggctccgcacctctggctgtgagatctgagcagagtttatgtcatttcctgggcttccaagtggaagtaataatatctcaggagtgttgggagaattaaatgagataatgtatgaaaagtgctcaggctagtgctgggacttagtaaacacttcataaatagtatcagcattatttctgctattatgaacatcatagatacctttactggaagattttggcaagcttcaaagcgatatccttgactagtctagctcattagaggaaagtagtgtgttcacaggagaacctatactattctgcttaggttttctctaaggatgctttattgcatcgttcttattcctggtttctggagcttcctagagcccccaggcacattagagcagtgtacagctggatgagaagggcaagttcaacctggagatgagggaaacagtaaagggagtttcacttaaaaatgatagcgtacttaggaggaggtgctgaggatggaggccctgggctgagcgggaggcttggggatgcccctctcaacctgaggttgagagagtggggttgagcattcagtgtatgctctcctgggaccaagtccacaaagagaagccatccatgcagattctaatagagctgagtcagccaataacgatcactcttaggacctgagtgtcgtagggcctggtcatcagcagtaggccctgattcctggtcccatgttggctgcccatcagcagctgcccagcaagactgagaagagtggcttgctttgacctgtgagccagagaggagagcaggcacataaaggacagccccaagaatctgtagtgtccccagtttcattcctcttgccctgcctgagccaagcaagagggatggccagcagtgagttccccttgaggtccgcacactgccagaacccctctgtgcacatcgtcccctgcctgtggtttaggtgtttctcacagggtccggccacaggacttatactctcagctgctcttcaggaaaggagtctggtactttggctgcatccacctctgttaattcactgtaggcactggcagagattgcactttcttctaggcttgctgtgctggccattggatgcccacatttgtaagtacaactcagggcatgtctcagcccactttattaaatagatatcctgtcgtcatggtggctgatgacttaccaagagtctccttcttgggggccattaaggaggaaaccagcttgcttatgtagacttagggagaagtctatctgccttgagacaggacatgagtgggccagcccaccaagaggatctcttggacccaaggagtctggatccccacctatgtggatggcaagaggagagattccaagaatacccacaggaaggttggcacacagagaggctgcagtggcacttactgcagatgcctggttttgcaattatgtgatacatgctcacagataatattgttgcattagagccaattacatggtgttatggacacacaacacgcagattacaaccagagccaggaaagcacagagtgaaaaagcgatggcctaatcggaggagacagagggaaacatcagccttattaaggttgccagggtggggtggctgcagctggacgtgtctcctccagatcaaagatggctatcttgagggatgcagtggagagccccacgttgacactcagaagggaacagtggaagccaggggcagaagccaagttggagctctccaaaggtggttacagccacctccgttgatttcagagtttaggcttcttcctaagtggggaaacaccacgcctgccccagaagaggccttcagtcctagttgctgcaaaagagcatcctgtatactaccctctacacttaagtaaaggctctattcttagctttttccgtagttcaatggttttccaacacgaacttgcatgagactcctctggaaagctcattaaacacacaaggctgagacccaccccagggttcctgattcagtaggggcttgagcatatgcatttctaacatgttaccaggtgataggcctagtctagagaccacatttttttttcttttttcttttttttttttgagtcaggatctcactctgtcacccaggctgagtgcaatggcatgatcctggctcactgcaaccttgacttaccaggctcaagtgatcctcccacctcagcccctcaagtagctgggactgccgttgctcaccaccatacccagctaatttttatttttttaatgtatttattttatttttcatttttttggtagagacaggttctccctatgttgcccaggctggtctcaaactcctaggctcaagcagtcctcccgctgtggcctcacaatgtactgggattataggcatgagccactgcacccagtctggggaccacattttgagaaccactgcccaagttccttccatgcacaacccaaggtggattcacctgtcgtctctcttgagcagggccttcccctaggttccgattccatcacggcattgcaggttccagaaagagcgggactgatcttccaaggtaggagtgagactacctgcttttgaatcccaatgctactacttgccagttgggatttctgaaaatgttttttgtggtttttaagttttgaatgcctctgacctaaacccctcttctttccgagcagttatgtgccttgcctagcatatcacatttaatcactgacaaaggcagagacaggatggttcagttctacagcagccaagggccaacaaaatttctataaaaatccagatagaaaatattttagctttgcaagccatatggcctgtgtgtcaactacccagctattgtaatgcaaaagcagatcgacaatacaaaagtgaatgcgtaaaaccagttttacaaaaacaggctgcattggatgggattaggcttgtgggcagttgtttgccaacccctggagctgtccattatgtgaatcttcatgtattcatcccgcctggggagcccttgtcctgcctcagtaccctggcattgagctaataggcccccaaagatgtccatgacctcatcccagaaacctatgaatgttgtcttacatggcaaaagggacctggcacatgggacaacattaaggatcctgagatggaggagttatcctggattgttcagataagctctaagggtaatcacgaggggccttgtaagaggaaggtcccaggaagtggagatcacagtgagtgtcaggagatgtgacaacagaagcaagaggcttcaatggctgtttggagctgtgttcaaatatattttttaaaaaatcgttgagtaacaaaaagaagaggttgaagtgacgcaatgaagcagccatgagccgaggggcatgggtggtctctacaagctgcaaaaggcaaggcagcaaattctcccctgaaagaaacgcaccccagaaacccattttagacttctgactgcaaaactgtaagagaataaatgtgtggtgccttgagccaccaaatccatggtaatctgttacagcagccataggaaactaacatgggcctcattcctggactcagtcttgcttggactcaaatcttggcactaccacatgcttcaatcatgaaatggaggtgatattaaaagtccctgcctcgtgggataattggaggaattaaatgaaacgatacaggctgggcatggtggctcacacctgtaatcccagcactttgggaggcctaggcaggcggatcacctgaggtcaggagttgaagaccagcctggccaacatggcaaaaccctgtctctactaaaaaacacaaaaattagccagacgtggtggtgggcacctgtaatcccagctactcagaaggctaaggcagggagaattgctggaacccaggaggcagaagttgcagtgagccgagatcacaccactacccttcagcctgggcgacacagcgagactctgtctcagaaaaagaaaagaaacggtacaatgcagtacccttagctcagagcccgtctggcatataataagctctcagttaatgttagcagttatcagtaacatctcatctaattgccactaaagctctatgagcccagtgctattattatctccatgttacaaaggaggaaacgtaatgagattaagaaatttacccatggttgcataggctgtaagtggcagagccagtctaaactagtctctgccttcgaggtccatgctcaccacctctccttggcattggggttgtaacaacaattccttcattgaatgccagctacttaggcagcggcacaagaagcaaatagaatgcagtactctgtgtgtgggcaaaagctgccaagactggaaatcaaataaatctgtgtttattagggaaacgaaaactgtagctgtcgtagcaatcagcgtctgagaggttaccaaccctctgacatccccgggctggccagccccaagcagcaaatcatgaaagtctgaatactgtgtttagtcattttggttctggaataattgctattatcgtaaatgttttatagcactcattacgactcacatttaaatatcagtgtagtaatacattaataagtcatcgctgctggactactgccggatgcagttatagttgaggccctgcttataattgtactgtatattcagctaaattagagccaggctgtgaactccacctgatgttgaatgactgggtgtgcttggaaagaagccccttctctgcaaagggttcttgctctttgaaagatagggaggatgctcagatttttttgtctggtggtcagtcaacaaccttaacttggtttcccctaagtgtggagcccagaactctgaaatggacagaaggtgaaatggagggatcatttctgccctggaggcatttctaatccaatgaagaaggggagagaagcatagccctcacccccaggaagctccctgccaaggcagagtgcctggtctgatagcagtgacaaattcttcagtgttgtttgatgagatcttctggaagctttctggatggacagaggcaggatagattatcccccactgagcatctccccacatacacacacacagaaaagaagccatatgaaacaaaaccgctaagtgggctcaacttcataaaatgccaaatacctgcattggcgagttagtgaagtcataaagtaggcaggagcaggcaatgtaaattttgtctgttcgttcttctttaccatcccatatgcctaacagtgtcagacacatggtaggtgcacagtaaatatgggagggagggagggagaaagaagaattaggttctgtgcctttcaccacgcagatgataagtagatgtgggggattacacggatagtctgggccaagggaggtgaggccactggaatcctgctttggactgggctcacaaggggctggagaaggaattgttacaggtccccttgggtaggatggagaatatggggggcactgtatgctgagtaaacctctatttccatgggggttggagtagaggggaatataataggccaggccaggactagattctctccatgaatgtcagtaacatagtggcctccacttactgagcacataccccatgctaagccttttaccagcctgtgaggtaggtaccattacctgtttcctcccacaaataaagaacctgcagataagagatattgataacttgcccaaggccacacaattcggaagtagtaggatttgatttcaaccatgtacagagcaggacatgaggctatggtaatgcacaggacagaaaatggtcctgcctttgcagacgtatgatgtagagggcatttgaagcggaagataatgtgtttacgaaaagccaagggcaaaagacatctggcttaacccatgaaggcttccaaagaaagggtccttcctgggccagtagggacccatggaggctcaggagagggtaagaggaattggattgttgagtaagggatgtctgatgtggttctgggaggagcggagaatagaagggcacaggaacaagtggccaccatgaggaattgtaccaagggctgtatccaactcttcctctttgggaggtatagtgaggcaggtgtggggtcagggagctgagagctatgcctgacttccccacatattatgtctctccacctgggtagtcactgaagtaactgatgcaaaaggccctcctgctacgtgatgtttctgcctctgcagatggccttccttaggtgccatgctttccctaggcttccataataggtttctccagaagggtaagcccgggtacttgcctatagcctggcttcattcttcaacagcctcatttcagtctggttcatttatggagctcacacctttctctttgcttttccctgcacaaaagtacctgtcagagctaacaggcaccgtaggagctccgttcatggtcgtagagatgcaccggaaagaagagatgcgcagagctcacagacttgtttgagattagatgtgctgaaggctgacacagtggctcacacctgtaatcccagcactttgggaggccaaggcggggtggatcatgtgaggtcaaggagtttgagcccagcctggcccacatggtgaaatcctgtctctactaaaaatacaaaaattagtcaggcgcctgtaattccagctacttgagaggtggaggcaggagaatcgcttgaactcgggaggcggaggttgcagtgagctgagatcgtgccactgcactccagcctgggtgacaagagcgaaaccccgtctcaaaataaaaagattagatgtgctgaaagagtcagaagatgcctagaaaatacagaatcacctatccccacagcatcctgtgcgaggcaacacatgcaatgggagtatcaaggagaatgcagcaaggtagtgctggactcagatcccacctccagagctttgcagtgattgttcttggaaaacttattttgcctccctgtggctcagcctcctcatccataatatgaggataacacatttgtagatttgtgtgttattaagcatatctgtttccttctccataaaccgaggacaggaataggtaactggcattgtagatgtaagaattagagatgttataatgaagcactcagtgcataggagggtttcaggaagcgatactcttactcaaggtgggtaggcaagtcctgagaggacagtagagggaaggagggctccacctgaataaaaaagtcagggcatgctcttctcgtctggagacctgtccacttgtcttcagctgctccactggctgggccatgactgttgactcatggtcttgcggtcacaaccatccctcccccgacctactacaagcatcttggtgcctcccctgctgctgcctggctgaccatctcccttgtctatctccacagtaccctcaacaacaacaacatcagtcgcatcctggtcaccagcttcaaccacatgccgaagatccgaactctgtgagtaagaagtctgtgcatctctcccattttctccctacctcacgcccaaagtgcagcactctacgctgcttgtcaaacctaccatgctatgactaggcagatggttccgacattcaaattcctccttctgctattaaccaaggggtgccttggcgagtgagggtagatgtagagtcaggtcatggtgccaccaaccatggttctgaaccaccgttctgcgtcagacagactcatttctcttaccctagaactgtgggaattcttcctgtgttgtgtgcatgttttccgtcctgatagaagagattagttttacattgtcacaaagcatatagaactctgactgaatgattcaccatttgcttagctaatgtcacgtaacatcagcagttctgtcagattgccagtggttgcaatggttttcccctgaggaatgacagtacaggagagtcactccttctctccacccagccagcccccacccagcacatttccctgctcacctgctccctggatgatattctgacattagaatgccgtctttctcatacttggttctttacctttgatgtcttaggtgggcttaagttttccagggtgcatactcaggaaacaaatctcctcatcgtgaccaataccgagagcagttctagtgctcttattacctggggagttcccctctgctcccagtcaggaacctctttgtaagtttctctgtaagtggactctatcagcctttccagagaggttcagacttgatacttggcttgtgttggtggagcttcggtggtatttgcctcacactggtcagggagagccagctcccaagggtgtcagccaaaaacatttagggccaaggccaagggctagaattcctgcagtcccctttattagctctgtttcctctgttccctcctctataaataggaatggtggtgaggatcagatgaaattagatatttaaagtgcctggcaagcagtagacaataaatgatattgattgttacattattatcacacgatcagaaatctggactgaaagttccaagcagccatctgatctgtgctgcctgtacaatccatgagatttggaaatccttagagcagagcttccacagtggggtccctagaccagcagcatcaatatcacccagaacttgttagaaaagcaagatttcaggccccataccagacataccagatcagaatctcttggggtggcacccagcaatctgtttttcataagccctccaggagattttaatgctcataaagtttgagaaccactgcattcatgagaaagcaactttatcttcaggcaaagataaaacaaagaccaaagaagcaatttatataaagaggtaatacagagaaccctaagaaggacacagagtttgcagttaggcctgagtttaaatgggagctctgccacttaatttgagcaagtttcttcatttctctgtgcttcaaggaaagtgagttcatgaatgcttgcctcaaagttgctgtgagaatgaagtgcagtttaacacataaagtgcctggtacatggtgtgcacacaacaaatactcgttattataaagaataataatctgagccctgcttccatctttgcttcccaaattctttcctggatccctcattgaaaagcataactcagccaagaaaatctgttcctttccctccctcttaaaatagggtagtgcagtaatggaattttaagaagccatttggtcttcaaagacctcttcaaagttcccagcaaaccacagatgagctggggaaaagtgggacccagggcttctgggcaagaagccaagagtgcacctcagggtgctgggcctgcattaccccagacatgtgggttgcatcgaagaaaaatgactctcacctgcaggaatcagccgtccagctcctgtgagctgttcctgtgatttatccttcccttctttgttattttcagtttagaagcagcaataacagaagctgggctcattccctgggagttgtagggacagggttaggcctggatctggggtactttgtttgggctgcagtagggcgggggaagagaacaggagggtttttttctactggtttctgttgtcattcttctctgccatcccgaacattcatctgatgagttcagatcaatcaatcaatctcgtctgttctctttgctccctgcctgctgccattttctctttagtttaatttcagagatggctctgtacagaactccctggagacttgagctgactaatcccccttcactgtaattaaagtgtgtatggggttgggggggacggctggtggtggtggagaagcggggaagaggagagaggaaggaagccataaatgggatttctaaaggaaagcttttatattgaatttagaaagccacattttatagaaaatgaacactgaccctctctaaaaggatttgctggaaatttaatttagcgtctgtggctaaaaggcaccttttataaattggcatttgtattcattcaccttatgttctgtagaggtggtttcatcaacatggaatatgatgtgtccatcagcaaaagattgcagaacaacatgcaggacccacctagccacctcggtgctacagtatctaaatgagaaactgcagccttgtccaggcagggccatgggctgggaagagagtgaagtctggagctagtctcctgtcagtcgtaattaacagtgaacatttcttcagtggtttgctgcgtgccaggccttgtactaagcacttcccatgaatcatttcaattctcacagcagccctaggaaggaggcatcactaatatccccatttgacagatgataacactgaggcccagagttaaattgccacccgaagtcaaagtcagaaagcacggagccagtgtcagactcaggcagtttgccatcacagcctgagctcaggccattcatcaggaacaaaagcagaagagcaggtgccaggtgaacagaagaagggggataagagcctctgcacagcccaggagcctatggaggccaccctcccttgtgtcgttgctgtcacacctcaccaaaactattgaaagtaattaaaataatgtcccttctcactcaagaggattagcgctacccctgacagtgcctaagctctaatttcatgccattatgattatttttcttttactatttgacatggtattgcttagcttgatctcccaaacatgttgtgaaaggcaagaatctacccagcttgactcttttagcatttctggtggatacaattccaagaagagggagtggagtctgttcaccaccctggactccactgccctgggcttttgacgagagccctctgatggctccaaatcagtctgggtcacctctttcctctggtgctcttgggaggagaaaaatttctattaagacggacaaagggataggaactatctgtatcaagattaagaagagagatagcttggggccagccagccaggattgagacaggatcaacctaatagaatcttccaaaagggaaacctctgacatttttattatcccagaaattaatcagctcagtaaggatctgacttacctaaacgtcatttttgttgttccattgatctcttacccttgatcggaaccgacgggaatttgtttgcattgatctgtgatccgccacatgcacacatgctccttggctcatagagaatccctgttgcctcagcttccgcgcctcactgcacaagagggcaaccacctttccaaataaaagccaaacgctcattaaaaggttctgcttctcccggcacacaaaagaacggcacctcagcctgcgcatgccacggcaggctgccctgtggtctgctttgtcccagacagacctactgttgccgtgttccttgggcaacatttatacccggcgaaaagtcagctgaaagtccactgccaagcctcctctctgtttttggcataaagtggttaatgcttaatgaataaacagaggttttgctttccctcctagaactgaggtccttcccaccagcttaggattctggttcgccaaccccttcctgcctgtctcacttctttccagagtccaggcgaagagcaagcagtgcttgcttcagctcaagaactctaagctttcaaactcaaaggggagaactgcgtgggacccattgtactcactgtatcttgggcccaggagcctgtgaaagtgtgtgcaacccactgggaaatgcaaaaaggaaattacatccagattaattatttttgaaacaaaatcataaaagtctttttcaaaattgttagcagaaaaaattacattttatatgggatataggttcatttaatctatctgatatgatgggatctggagccccctgcggcggccaaggccccagtggcccaggcctatgggaggcttttgcccacacagtggcaggaaggccctgctggcatccagcaggaggtagctgcacttggccagtgtttggcaatgttgaccttacactaagtggagcttggtcaagagcccttcagctctctctattccaggcgtggagggggcttgagcctctccacagggctgacactcagtaataactggcttgacacagactacttgaaagtctttatatactgctagctgattagcatgtccaggatttaggcatttaaaatgtgcatccgaaatgcaagtacatgacaagctgacgtgatgaaaacttacccactaccaacttctagtgacctagggttgtagggaacgtggaaatgggaaacccctgatagagagaccttgggggaagaacctggaatatccgtagtttgccttagaagcccctggatatccttagtttgcctccctggtagtggaaaggaagttcaagtcacttaacttgatgggattcccctcagaagtgaaacacacagatccctccagggattcttatctactcaggggcaagaaattcatccggaaccacaactaccagagggggaaagccaaagcgtcctagaactggttagaaaatattttcagccatacctgaatcagtcagaatagcaaatacaccagacagaattgaacacaggaaggaaagcaagggcactgtggagagatggctatggattgcaagagtctggtacagacaacaccttatttaagtgggagggtggaaagaaggtacatcctctaaaaatttcccttctgtctgcagcctgctcactccagctagtgcacacaaagtggtattggttttaagcccacaagcattacatgcagtgggtttattaaaggacacttagcgggggaacgaagaacaactcagggaaaggcaacagcgtctctcagctgcatgtcgctggagatgggggcattgagattgagaagcatgtttcaagcaacctgtaactcatgctggctaaagtgctgaaatttacaaataaatagcccttttgtaagtttgactccaatcaggatgtcactgtaataatgtcactccccttttctcatgtgctgaggcttgcttgagtgaaaagaaaagagggtggacttgctattaaaaaatgagctttgctcagaaccccggaggcatcctttggatgtgacctggcaatgaaagggttggggctcccatgtttttggtagtgcagagggaattgcttccctgggctcctagggattttcacactggagaaaggggcaacaggggttttggtcactctgtctggccagtgacagcctccacacttcacctgtgaccatgccttctctctgtcccgccctctcccaggcgcctccactccaaccacctgtactgcgactgccacctggcctggctctcggattggctgcgacagcgacggacagttggccagttcacactctgcatggctcctgtgcatttgaggggcttcaacgtggcggatgtgcagaagaaggagtacgtgtgcccaggtgaggatgctttacctgctctcccctcctgtgctatgacccacccacccatgagctcccacaacatcaccctgaccttgaacacataccctagcccagagcttggtgtggaaggaaccccataggtcgtcctcagtactcagtagtcacttaaagaactgtgacgtgcctcaaagggttttaaaacagaaactcttgtcatctggtaaagggaaatgctaaaagaattcatgaactactttttcagcccctagtccattgatactagaaaccgaacatttgttgagccacacataaaatggaaacaggtataacggaggtgttctagcatctgctaaacatgttcctgtcgtcccattgctcatagaaattggaagacaagataatgtaggctctggagtcagctgcttggctggaaatctcagctctgtcccttagtggtgtgtgactttggcaagttactgctcatccgcaatatggaaataataatagttcataactcaaagaacaggtgggaggattaagtgaaataatgcatataaagcacttagcataatacacagcccttggtaaaagctaaatcagtggagcttaattattatagtttagtgggctcacaaaatgtgctgagcaaacataagagtttgatctgtgggtaatcgaaatgtaacagaagcacagattgcctatgtggcacagaaaacagaatgatgcagacacataactgaaggcagctcagatctctggggatgggaggtggctgagtaacccaggaaaatctttccaggggatgtagctttaaaacagagtcctggctgggcacagtggctcatacctgtaatcccagcattttgggaggccaaagcaggtggatcacctgaggtcaggagttcaagaccagcttgaccaacatggtgaaaccccgtctctactaaaaatacaaaaattagctggacgtggtggcgggcacctgtaatccctgctactcaggaggctgaggcaggagaatcgcttgaacctgggaggtggagactgtagtgagccaagatcgcaccactgtactccatcctgggccacgacagtgaaatgtctcaaaaattaaaaaaataaataaaagaaccagggtcccaaattttagttgtttgcttttactttgcattggcaccttccattctcaccaactcttcctttttctgtggtaaataagtagagctaattccttgacttcctaaaaaaacaaacaaacaaaaaaaacagaaagcattcagttgagaaatttcccaaagaggtattttgatttccaggaagccagtcccagaattggggcccagtggcctctaaaggctgagtctggggagttggcatgcaagaggaaacaaggaccccagggagcttaagcactgtgagctctgcatttctctcacctttctaactggtgcccacctttagtactaaagggtttaccgggcccagcatgggctgctggactccagtatggccagaagcgcaaactctctggcctcttctgctcttagatcacacttgcgatatacaagaattttccttgaattcaacttcatctcattctctgccgcttcctcctgtcatgttgttattttaccatgttatttattatctgaaaatattttaacatgtctcaagcagtacctcaataacttcctatagacacccacttagaaatcacttcccatcaaacacatataataaaaccatttatcacgcaggcaccaacttcaaatatagtgactataattacagtaattattcggcaaagggtacaatatcggcataagtgaaagaaataattatagagtacgagagtcatccaagaggtagtgagaaaaactaattagaatgataaaacacatcattacaggtgagtgccaggtttaatgtagtgtatgacctcacacaccacttcatcagagagcaccttcctgtcaaaggtgcagcaagacattgctcacccagcagcagtcaggatccaaaaccaggggagaaaggctgaccctccaaagtccattaaatctgaatgcctcactctttctcctttggaaaggctaggtccagcggacaggttcgtagttacgtgggagcacctttatcaacttctgtttatagcagttaatcccattgcttgtgatggtccctggagcttcttagtatgaagccaggtgtcttttgagaacatgagaatttagtccaaaggctccagacatgactatgctgttaacctccaccctctcgcctgtagtatgaattaagggcagggacatattgagacccctatgcatgagggattctttaagtgccttagcagactcccatgggttaccacctagaatgctgtgagccgttactctctgaaaaggtcaaggtcagatataaagatctgggggccctggtgcagtgaacatccatgaagattgaactcctaccatcatgagtcaggtgcatgtggaacatgccctccaaagacttctgctattacgtgggtgcaaaaataattgtggtttctgccattactttcaattgcaaaaactgcgaatacttttgtaccttttgcaccaacctaatgcgttttcaaaaattgttaaatacactttgtgagacaatgacaaaaccttgagaggaagcaatgtggaggaaggttcagtctgtgagtgtgcagttgaaacatgagtggtcagtctttgaggccctagagaaggaggttaaggagaagagctattttcaaggactgaccacactccacacgccaccaccaacaaccagtcctgccccaatgcctgagccccacaaggcatctgaaggatactgttttgtatggacctgtctatggtggggtgtttgtttgtttgtttgtttgtttgtttgtttgcttgagacagtttcattcttgttacccaggctggagtgcaatggcagtattttggctcactgcaacttctgcctcacgggttcaagcaattctcctgcctcagcctcctgagtagctggattacaggcacctaccaccctgcctagctaattttttgtatttttagtagcgatggggtttcaccatgttggccaggctggtctcaaacccctgacctcaggtgatccacccgcctcggcctcccaaagccctgggattctaggcatgagccaccgcacccggccctgtggtggtttttaactgcaaaaaccccaaatgcccctcattcaagctattcacctgttaaaccacaagaggagaaattcagtcaagaactgaagacaagaacttctcttacaaaatagaggtcatccactcaggaggaaaagaggcattggggtagcaattaagccatccctgggcatagcttcatcaccagcagtccccatccaggcagcataagaaaagctccctgagcctttaaatggtatcaaaaatttcaccaaacacatggctccagagacaggaaagagctttatctcgctcagcctgtgagggctctgcctgcccaagtgcctgatatctccctttgaattaaatccagctgtctggagcccagcttcttctccccagaagccctggatatgggctccttatcactccagctaacccagaaatttgctagcagtgcactttggcaaaattcatctcctctgtcaactgtacctttccagttgaaggcatttattttcttcccctgggtattgggaatttttcacaagggtggggaaatagagctttatctttttattaacttttttccctatgttatacaacttgactacttggcccccttcagcttctgctgaaaggatttctgtgaacttttcttgtttcaagaggaaggttaaggccctacggctggaagtgtctggttgcttgtggcctgaacccgaccagaactttatcaaagttcatgatcatagaccagagaagaagttcatgttacatgagttgcaagttgttggtttttttttttttttttcatccttatctaaagggtttatttgggggtttaaattttaggatttaccttccacttgttaattttctggtaccttaatctggaagggtttctaccagtcgcaatttgtaattcaaggttattagttgacctcctaaatcagttatctctttgctttgaatgtctttgaacccattggtttgtccatctgtttcacacttacctgcccttggccttaaatgtgagatatcctttcctacagacattagtcttgtcttctagtaatgaggggccacgtcgtacactttttcaggtgccccaaatgcctagaacaaagcttgaacctaatagcctctcaataagcacttcatttattattaaaaatgaaatatgcttatctctctagaaacaagaaactttcccttttcatcgtcttttttttttttaatttgggactagttactaagtacaaagataattaaggtaagccatgaccagccacccatctccttaggaggttttaattaaaacaccataattggacattgcaggaatgagattattagctttatttagccattcccaaaattatcatgcctctggtatttaaatcacattcatttatattctcatcataattgctcgagtcccattgtcatcgcagtctgttgttggcttttgaaaggccagaggccagtaaggatgcttaatttgaatactggaattaatttatttccacatgctcacaaggccattggagcttttgactctgcacttttaccaagtgaggtttttttgttgttgttcagactttcaaaatattctgtaaatttttttattttgttttgaattgacacacaataattgaacatactgatagtgtacagtgtgatgtttcaatatatgtatatattatgtaaaaatcaaatcagaggatttagcatgtctgtcacctcatacatttgtgttgggaacattcaaaatgctctcttctagttattttgaaatatgcaacacaatattgttaactgtagtcaccctactgggcactagaacaccacaactcactcctctctaaccataacttcatacatgcggatcagtctctccctatgtcctcctcccgaataccctccccaggccctggtaagcaccattctcctttctacttctatgagatcaactttcttagattccacatataacttagatcatgtggtattttgtcttctgtgtctggattatttcacctaacataacgtcctccggttccatccatgttgctacaaatgacaggatattttatggctgaatagtattccactgtgtatatacagcacattgtctgtatccattcattcactgatgaacacaggttgatcccatatcttggttactgtgactaatgctgcaatgaacatgggagtgcagatacctcaccaacacaatgattttatttcccttggatatgtacccagtagtagaattgttgaatatggtacttctgttttgaattttatgaggaacctccatactgttttccgttgtagctgtactaattgacattctcaccaacagtgtataagagttcccctttctccacattggtgccagcatttgttgttttttgtctttttggtaataaccattcaaactgggatggggtgatagctcgttgtggatgaggttttttaaagatggaaagaaagaaacactgctctaacacaacagtgtttgatcatctctagtgtagcttacacaacctgtgtctcagtccctgagcctgctcttcctacctcttgagattccaaggctctgatggttttcagtttcatggcaataaatggaggaatttggggttccttttggcagagcagacagaaagaagagcacagggctaaacattaaaacattgttgttcactagctttatgatcttggacagtttgcttaaccccctattcagtttcctcatctcatgctaagggggaaaaaaagaatggaacctaaatcatgggttttatgaggatcaagtgagataatatatacagagcactcaatgcagtgtctggcacatagtacacattgaatacatgttagttgctattacgagactgatggctactcttagtttggaccccactgtgtccttgggcaagtcccctcctctctcagggcttctctttccttgccatctccatgggcccatctaagtgtgaaatttggtggtctttttcccactcatctcagcaggcaagttaggacctttcgctttcaccttgataatcatccccattttaccatttaggagaagaacaatgtggctgggcaggaggcaggtccctggttatggctcagtctttcttccctctgataacttcagggggagttatacaagcagcagagatgggatactgggcacaatacccatgcaagcagccgcagggactttccctgtgagagtttgggctggagacgcatccctcccctctcactcacttgagtgttccctggaccggaggcagcaccactgatgatcagtgaggagctgggaggggcctccattctcccaggctctgctctgtcccccttgaagtcatcaggccatggtccagggggccttaaagacatctgaaggttaggaattgtagtttctgccccgtttggcacaaagacagctttggcttcagatagagagcccagagccgaagtggtgaccaagtcccccccagaggggagacgcgtattgagccacatcctcagcccccttttctggagaagaaatccaccccagcagagcagcattttagtgccactgaaagagctccaagagcagatagtgtggacacttatttaaaaatgaagacatgcagagcaagtccacatgctcctaatcaaaacatcttataacaggggttctatagcctggtgcatcactgtgctctgagttaaggccaccttccttgccagtacataggctcactcaaggacagtgtgggtcatgagaccgccataagagcatgctgtacaagaggaacacacatgtgcatgcagacagatgctttcatcggagatatagaaagtgattccttctatcccaatataaaattgctattcccattcctctctgtttcccaacttacagtcatataatttgctgggtaaaaaggtaggtgtttccttactttgtcctccttggaaatccactgcctctaccttccccaacatgtgtggacagtaagggctggaaggggtggatttgctgacagagctcagtagactgcttaggacaccctggcttgtgcaagtgagataggctcagaggggccccaggtgacttggacaagtgattttgccagcatggaaagctgtggtggaaagaagagagctgcagacagagtcccatctcccacggccactccacctccccattctacagctcatcctacctaccagaggccaggcactcaaaactcaggaagcttccctcagggcccttccagaaggaacactcacctctgtagctttgtgacatttagcccctccacatgtgccaggcttctgggcgagtgtccttatgtacttatcttctcatttagccaaggtatgcttatgggtccgtgctttgtatggagccctgttttaggcactgagagtacaccagtgattaagaccaaaaacaccactgccattatggaatttacattccaatctcagtccagacagggagcaaagtggagggacttctgccatctagctctccgtggcccacagggaatgggcttggtccattggcatcgatcacaggagaatgtttctagggaaaacgaacccatctttcaacctcattgtaagccagaagtgtttcgtttaaacaggaaggtaacgtcctcaccatgtgcgaatgcctggctggtgagctgccagcccagggtgctatcagaggctataattaccattgtttctctctgcctaattaaaggtggtgttagtgacctggttaaggaatctttttcaaagacttcttttgccttgacagcatcccttgaaatgtagcacacactgccaaacagaatgggagtcaccctgcggaagacccagccacttcccagagggactcaaggctgtgccctgggtctggtttagaacagaattaatttcagcctggaagtcagaaaggggtacttttggaagaattccatgttagaacttccaccgccattataagcccttgaatatggtatctttctttccccttttccaacacaccccattcaagtaatatttcacagatcaaaagagggagggccatccagtccctccacctgaacagatggaaaatgcaagagttcagactcccattcctgacatttccaaacaggaaggtgtcccaagtgtgggacttctccctggctttgtcaggtgtgctctccttttgatgtggaaggccaggctccgcagttttctttagggaacgccatctgtacttcaaacaccctgacatctgaggccaactgctcccaacctcccttcgatgtgggtgatgggatgggagcctttcacaccgtagaattccctttgctgtctgcaaagagaggtggagcaggggaggtaaagatgttaggtattttcactccttctcagaaagaacttcagtaatcatgcaatccaaactccttattcactgacatggcaccaaaaaaagctcagagagaggtactgtgacttgccaaaagtcttacaaacaatttgtagcagagcaggcccaataataacaatgaacattaccaaactcttaccctgtgccgtgtattctaataaagacgtctcaggcattacctacctttgccttcacaacaaaaccatgctatgaaataagtattgttattttccccattttacagatgggaaaactgaggcacagggaaataatgatgaaatgatagaaccaggaatcagatagaggcagtaggacccagagcccacattctcagccccaacactctcccattcctgagctgagtctcttacaggttggctctctgtggttgccactttctcagaagtataaaggctttcccagtttggaacaaggccagcatcaccactctctctaggagaatgttccagctgggaattcagtgtaagtcatcatctttcgggcattttccatggtctccattagatccacttgtgtagcactggcaactttgaggtccatgtaccctggacaagaatattttctcaaacatccccactatgaggccattttttcagtttttgttttgtgtatatgtaagtgaggtcgagggaaataagaatctttggtcattgggctggcactttctggggaggtaaacgttccaaattaagctgtagatgtcaactggagcccctgcaggaggatccacccttggggccacgaggactattgaacgcggagagcgcaccaccttctgtttgaagcgtccgcgtccaaacgggacaccaggctctgctggtcgtctggctcaatccctgtagctagacccactctggcttcctagactcagtttctccagtgaacaggggccaaaccaaaaatcactttttccctgcagacttttttcatgttctgtgtttaatctacaattaagagcccccagccagaggccccatgtccaagcagtgaggcaatctgcagacctcatctaagtttggtctcagtcatggctcttttccctgagaggacaatctggaaagacattgaaataacccctgttagctggatccagcagcagtaggatgaggtcctgggagggatgtggggttgggcttctgttttggaccaaaaaatccacatttggaaagctaaccatatgattaagagtcttacctcactttgagggaatagtcatagcatgcaaatgtttacaatgtccttaaaacatttgcatttacttcttgtattcaggatttaatgtgaccaccacagaaagtgatttagattcctggtgactctttgaatcttgagttgggttagtaatggatatgtctatctacatttggctttctaaatgagctccttaggtactatttgcttggctttctgtcactttgcttgaaattcacactgattctcacctcaaacaaaattaacagctggcttcaaaatctgtagtaacttactcacctttttttcaggcgagatagcttttatttgcatgttccctggacaaagaagccatttggaaatgccttgggtgtagctgctggtgggggtattaacactttgacaacatcaatgccgcaaatggggacattctgccacttggttttgatagccccgtggcttgcagccactagagaaaggtctaaaagctatgtttacactcagcgtccaataccagctaaaaccccaggatgcatcctgggaaagtggtcccatcatatgctctttggattctggcagcatattttcatgtgtgactgactctgagggcccctctttctccaaaagatggagatgacaggataacagagcaggcggagcaactcaaacagtgaggtcaagtcagactctctcctctttgctgaatatttagcctgtggcacctgtgtctcccaggtgaagggagatgtcagctggtgatcatttctcagatggctgtcaggtcatgctttgcccttaggatgctggttaaggacacagaagcccaggcagctcctgacactgacataagttgaccgttgtgtcttggctccacagccccccactcggagcccccatcctgcaatgccaactccatctcctgcccttcgccctgcacgtgcagcaataacatcgtggactgtcgaggaaagggcttgatggagattcctgccaacttgccggagggcatcgtcgaaatgtaagtgcacctgtctgacacccccaacaactgtcgccggagaattcagctccctgtcccagcccatcacccactaggccatcagcgtgtggggctgctggagctgaccattaaaaacactcaggaatctctttgctgtccttccacactttcccagctatgatagcttggtggtcaagagcatagactcgagatcagaatcagcaagctatagcctagggccaggggttcccactgcctatttttgtaaatgtttttgaatacctccacatccatttatatgtgtcctgcctgtggctggtctcatatggcagtattgagcagctgtcacagaagactgcatggcccacaaggcctaaaaagtatgttctctctggcctgtcccaatgagtttgcaaactccccttagagtcacgctgtatttgtatcctggccataccgtttactagctgtgtgacttcaggtaaaataatgtctccttcatcctttgttttctcacctatattaatgtgacaattatagtatgacacctcagtgggtcattgtgaaaactaaatgtaatactacacgtggagcccttcatacagtcctcagcacatgggcaggtactctgtaaaatagtggtggaagtggtgggacgtaaacaaatgattcactcatttcttagctaccattatctgagagggggactgagctcttaattatctcagatctgatttttgtcctctagattagatcatttttaggtaatgacacaagatggtgtttgtctctgtgtatacatgaatgtcaaaaattccagtaaaatgtgtttgtccacatagttcggtctagtccactctcccctcatacattagaaaatggccagtatctcattctaaaatgagtagagggccagtcaacactgacctcaagattattctttaaatagcgacagttgttttcatttttttgccttcacctttagttggcttgattaaaaagatcattatatggagcccttctactgagaacatcattaggtaaaatccctccaaataaaagatacatattccccttgcctttctgctttgtcgtaatctcccccctttcttctttcctcctcttcctcctcctcctcttccccctcctccccttccctgtgtgtgcccttctgttcccaatgcattccaattgatgaccattgactccttcattcattcttgtattcattcagtaaacatctgttgtgagcccactattttcctgtcattgttctgtgcttggaaagacagaaacaaacaaaacagacacatttctgcctgtatgacacttgccttctagtgatggaggggataaacaagcaacaaagtaaagtaagttagataacatgtcagaaggtagattctgtggagaaaaataaaataagaaaaggacatgaaataagcgagagaaccaaatggctatctggaggaagagtattataggttgagggaatcgcatgtgcaaaggccctgacgctggagtgggcctgatgctccagaaggccagtgtggctggagtagagtagacaaaagggatggtaacaggggatgagatcagagaggtaaggaggggccgcatcctgggacgttttaaagactttggctttaccttgattgaaacgggaagaagcatacgacttaccacagtggagtggagacttcgcttcttctttcttcacctactttgccagcttttctttaattcctttacagtcccattttccagccatagtagacacaacccatgcctccgcaccctctggcaggcaggagctggttagtaaagagtcctttctgcctgccctctccgccttctgcggccctccaccttcctttccacaaatactgacaattcattcccttagggttttaatgcacctctccttcagtccctgtggtccagtgctctagctttagagagcgctccctctacggaatctacttagtcctcacctacttctcctgctcctcctacggccttccaacatactatctaatttactttaaatatctccctccttccatcattcctcctatttcctatccttgctctctttcctttttgcactgtttccctttcatctttttttttttttttttttttttttttttgagaaagagtttcactcttctcacccaggctggagtacaatgacacaatcttggctcactgcaacctctgcctcctgggttcaagcgattctcctgcctcagcctcccaaagtagctgggattataggtgcctgccaccacacccagcaaatttttttgtacttttagtagagacggggttttatcatgttggccaggctggtcttgaactcctgacctcaggtgatccacccgcctcggcctcctaaagttctgggattacaggtatgagccaccgtgcccgccctccccttcatcattttctccctcccttgatgcatttctccccttctctcccttgccctacccatggtcttcccacttctcttccccactctgcccacctctttctccacccagttaaccttcacttcccttccctcaacatccagccacagtgagcctctggccctcccacagtggatgttcaagacagaattcctgccagccctcatctcatttcagattcctatggatcgttcctttccttccctgccctaccttattcttttctccttccatctgccaggtttttttctctttggcagccatagaccgtccctcggctaggttcccaaactgcagtctgatgaaagagtccagtccaggtagccaggctgtagccagtgagcccaccccagccctgattgaggggctctgggcctgccaccccccttccacttcacatctctatactctcagtttggacctcgtggatacacagctcagctctccaggagacagaaattgcagataacaacatcagaggtgggctctgtgcaggccagaccatacctgaaaggttggactcacacctggatgtgttgaattttaaaagcaacattgacaagctagaacagtaattgccaaaagcctgtctattacgactgagtttttctctgatatcaggtaaagtgagaaaaacaagaacaatgtgatatttttctattgagcaaaaatattcagtttaaaggagcatcctttcagtttttggacttccttattttgttatcatcgtttttaaaaatgtcttttattttataaaatgatagccactgaagacagagtagtctctgtgtgttatctatgtgtaattattgtataattatactttatgtgtattgtatagtagatacacacagattgccataattggcaaaataaaaggtcttgtcaccaccttgtctttgaaatccaaaagtctgagaatgatcatcctagctagagtgtttccagaaataaggagatacaaacaaccaagaggttaagagtatagactgtggatcccagcagacatacattccagctttggctctgccttgtagccatgggcagataacttttctgagccttggtttcctcagttgcaaaacgcagaggctaatggcacctccttactggttcttatgaaagttaggtgaacgaatatagtaaaatgcttagcattgtgtctggtccgtaggatatactatattaacaatgcttgttgttagttcatactggcaactactacaactatcaccacgacctttattaggatgatgacaatggttagaaaccacatcctaggagctggagctacctacacaaaagatccctccgtaaacataggtcagttctttgaagggttatggttgagagaataggttctggaactaggctagccacttgcattatgacttgaacctgggagtagctcatcttcatgcaaatgtattcatatatgtaaataagactgcccctgcgtattgggcacccacggtctaccagatggattgccgaggacttttcttgctgtgcttgcctcctcctcctctgtgataaaatgaaactgaaaaattaaagcagaggcggcaagtttctatggctggatagggcagttcgagaggtgacatgtaagagagaacttgagagcaggttggaggggggatcctgcttcttccatgtacctggggacctgtgtgatggcctaaaagtcttctaccatgtgagaggtcagcagatgggtgggaagatgagaaaaaagggagcagagagttgaaacagcaggatgcaccccaggatgaataggagttatctgatttatcattccaaagacatccaaatgtcttttttttttttttttcttattgagaattccactccttgtccatggccacccatataatccagatttgtactttctccttaggaatgcttggtactgtgttaagctctccactccctattctcaatccttagctactagtgattctcttaaattgccttaaccttgggtggggctctgcactccccaactttaggggaaggggagggggttgcctatctctcatgcaaaacagtctcgcagactctcttcagtgttttccaaagccaaagcagctcagaggagtgtgtgctggtgtccccgaataccagagcccattcctctaaaaatagttttcttccagagaacccacagtgagatgatgattcactgcagattttcttcgaagctgagctcccaccgatggcaccgttctcactgcaccctgtcggttctctgaaccagctctggcttccagcaggttttgattatgggaagccccagagacccacatgttcatctgctctgtggtcttcagacgccctcatgagtcttcaaaagctctggagggaccatctgtctttagagtcccatcttcttccacttttgctctgtatctccccatggtggtatcccgtgtctcgtatcttctgctatggaagctaaatgtcttccatgaagaagggctatggacaggcttccgtgtccagtcacaagtgagagcatctggcaggggaaatagccccagttttcaccctgcctccccttaaccacagtgtctctctgagatagggaggcagccacttaacaatagcaaatattccattcttaccagccaccagggggtttaaaagacacacagaattaaaaacacaacaaaacaaaccagcaaacagaaccagagagctggaatgttctagaaatcatggacatcagtgactcttggattttctgagagcaccaggtttccatgtaagggactgtcacatggaaggaggggtgatagggtgggatgggagcaggtggtacgaaggagaagctgatcagacagagtgactgggaacagagcattgggatccacacttgggggttcgaatccttgttctgcctcttactttaagcacattccttaacatcttcatgcctcattcagttccccactttgcctaaagggggtcatcatacctacctagaaatctcccgtgaagattaaataacataacatggagaactgtttggaagctactaaaaagaatgtaaaaagcaaaaacatctgcacatgtatatgtgtgtgtcatcacagaacgatttagtctcaagttcccatgcaattcttcatccattttgttctaagacaaaaaaataatttcctctgtggcatctgagcacatgcacagaataagcaaagcaaatctggctctgtgctgtgtctgtacctctgctttctgtaggcaataccaggtgtctacacacagcacaggttgggaatggcttttctcagatatgcctacattcctcatcttctctatggatcaaacatgtaaactggatgggagagtctaatacactttacctttctttctttctttcttttttttgagacagaattttgctctcattgcccaggctagagtgcaatggtgtgatcttggctcactgcaacctccgcctcccaggttcaagtgattctcctatctcagcctcccaagtagctgggattacagacacccaccaccatgcccagctaatttttttgtatttttagtagagatgggtttcaccgtgttggccaggctggtctcaaactcctgacctcaggtgatccaaccgcctcagcctcccaaagtgctgggattacaggcgtgagccactgcgcccagccaacagtctacctttctgaagaaccatgaggaccaatggtaaagaaagagagaggccagaaagggactgccccagaaggtgggcccagagcataaccttgaaaggaaccttcctttttagccttcttccagcatagggaagcatcaggaactgaacctttggggtctaagttgtctggtccaaccaactagcccaggatgacttaaaggaagaataaacatggggcttccttccttcagcgtgatctggacatcctaacaagagttcccaagtcaaggaaggctgagagagatgggaaagagttaagaaaccacaaaagtggcttctgggtgggaggcaggatagcctaagggttaagaacacagggacttcaaccagaccaacctggattcaaattcaggctccaccattcactagctacctgaccttaggaaaattgacctcttcgtaccattatttcctcatctgtaaaatgagtacattaataatactacttggttcatagtactgttgaaaaaaataatttgagccagtgtgcaaggaagacagtgtctgacatatcaaaagccctcaataaatggtaaatgttcatattatcaccaccaccaccaccaccaatgtttccacacactccaggaccttttaaccaggtgacttgcagacatgcccctgtgccggccgtgcccctgccaggctccctggcatcatgttgacttctgtattgctagaaatatattgtgtttagtcacatgtttgcaaatgacagatcattaaggaagcatctgaggaactagggcaaatcaatacagagcacaaatggctgaaatccccatcagatgttcccattgtttttgctggtgcgggaagacactcagatgtttgatttgtatgtttgtttttatgctagttctattaaatcagtttgcagcctgaagagtgtttgccagacaaagaaagacacatgtgccagttaagagagacctaaatcagctgttggcttcagacacatccctaaatgtgacagtttttgctgatgcaaatgcttctttttgtcctttccattgagcttttcacactaggagtctggacctttgcatccttgttctaggttgcaggactaggctaagtgcaaagacttccaggagtacctgctgcacagagactgcatgtgaacctgcacacatgtgtgcacactttccaaccttgcttgcatgacaaaggggccattttccctgtggatgagctggaaaggactaagaaaatgaaggcccttcagctccaaatggcattcagcaaagcctggtgattgagagtctgggctttgaagtcagatgaacttggctttgagacccagctcaacctctccctgactttgtgaatttgggcaagtgacttaatctctctgagcctcaattttctcatgtttaatgtggaggtggtaataactaataagatctgactcatagaatgtgactattaagtcagacagaccatgtgaaactctcagcctggtgcctaacaactaagcacctgatccatcatagctcttggtggtagtggtggttatggttatccctcccctttcctttactttacattgaaggtacacaaactgttcgcaaccacgctcccactgcagacaaattcctgctgcctcctggggcagggttgaccctcatcatgcaatggccttggcactccaggaggggctgggtgttcagccagtgcccaaaacagcctgagaagctgagtaactgcagacaagaatgaaacccaggccaggcgtggtggctcacacctgtcatctcagcactttgggatgctgaggcaggaggattgcttgaagccaggagtttgagataagcctggccaacatagtgagacccctctctctacaaaaatagaagttaaaaattagccaggcatggtaatatgggcctgtggtcctagctactcaggaagctgaggtgggaggatcacttgagcccaggcgttcaaggttgcagtgagtcatgatcacaccactgcactctagcctgggtgacagagcaagactctgtctcttaaaaaaaaaaaaaaaagaagaagaagaagaaaagaaaaccaaaagccagagtgagcaagtgtgaggggtgcaggatgcagagcaagatctctgccaggcttaacaggctaagcctggaattcttttttcttcgtttggaagccacacctttgtactccatttatatgtcttatgtgtattcacatctatatttcatcttctctgggctcctgcagcttttccctgaatacctacttccacagagactgcatgacgtctctgtgtgtgagccctggggtcctaatcccttaaactgttctgtgactttgagaaagtccccttcagttcctccattttcacaaatatatagaggcagcatatccaatggatagaaacagagatatcagttctgcccgttcctggccctgtcactttggacaagctatttgattcctctaggttttcttttcctcatctgcaaaatggggccaatatggtttacctcacaagtggaaggattaaaagagataatagacatagtcaattagaccccataaatgatggctcttgatgtttattatggtagcaataaaatttggttctgtgatgctcttgggctggtctctctcatcagattctcagactccttggggccagcgtcacatcatgttccttgattagtctctccctcaattcttgcacccatcattaagatggagggtaattgattaggaactgcatagagagcccacagacctcacacccagtgctagcctgacttgcataggctcattggcctgcagttgggagcagtggatcctcttgcaaaaactgaggggattgccgttgttacagacagtggctttccctggaggcatcatccagctgaaatctcttgccacagtggcaggtgaatgacgggattcctggagagcacgcaccacctgactggcagccccagagatccatggagctgctgccttggctaagaaatctctgctgaactctatgctcagctggaaaatgagcatgtccttggaacttctcaggcaaggcaggctgcctcaagtctgctgtctctgtgggtggctgtatccagtagcccacagtctctgagaccctatggtaagcttttgtggctctctgtgagcaggctagccaggcctgtgactgtgctcccggtaaagtgcactccccgcccccctccagcagggtacaaaggcattgttaatagatcgtggcagtctcatttgtagactctattcatccggcagccaagaatgatatgtcctgatactccctctctcctctcacccgcctttcccctttctccctgctttcccccttccttttgcctggagagtgatttgtctgtgttatgggttggcctgacaaaccattccacattagcagctgagatgttgtttgaaatgggaaaattgctggcaaactgctccattagcagttccagtaacaaatattctgttcccccaatgaagatgagatcacagaggcacaaattaatacgactgtctcccccactctacagcggggattactcttcaagatgaatgggttcatcccagccagaaatgtgcatccactagctgtaggcttcaaggaagcccgttcctcccatctaccccttttgctcccactacgtcccctgccacacacacttttttgtgtgtcttcccagctgagggtttggggagcatcaaggccaaatgaggggtgatgaaaagacctgcacctcggagagaagggagatggatgaggatgagatcctgagcctgggccagggtgccattcatcaccccgaatagagcgccccacctcccccacatgcctgtttcccaccacacctgttcttggtgacaggaagtcatttgagagatgaaagaataaagaatggaaatgctcactcattccccacggccccttctcttccaaggaagttctgggccctgggcctgcagcgtctcttgttgctttcaaagtaataggagaggaagcatttcaggaaactccataagaggttaaaggcacagattccagcagcagacccggggagtggtccagtctgggcccctgggccttgcaggatgtcagggagccagtttgatgaatgtcaggctgggagcctaaagacgttaaggctgttcctgcactgtattaaaacagcccatggaaaagctcagaaatgaagtcaaccattgacatttctgccccattagcagtgtggctgactgtttaactgagtagtgacatggttccatgacagataagcattgctggcccatggtccatctctttttactcttccttctctttatccctttgacttattccgcattctgcttggttacttctacagctttctctgaagaagacagctgctgccaaaagcagtttataataatcaagaatcaaaaatcttcaaggaaagatcatcctttccctctttctccaaggagagttagacccttggacaggtgctccatgtactaggacctgagttctctgactgctgcagtgttttgtctggtctgccacaaccagaccgtgcacctgtgacaaaaaagacctccctgtccttaaggccagagaacacagtagccctcagtgaccacttgttgacaggtggatggttaattcactcttctctgctctgtttcccagacgcctagaacagaactccatcaaagccatccctgcaggagccttcacccagtacaagaaactgaagcgaatgtgagtttcccctgtggagaaatgggcccaaatgttttcaatttccagggttgtttgcaatgtgtagtgggcaacctgtccaggtgacggaccatgtccattcctcctgggcagttctgtttcagacctggaacgctgtcctaagcttgggaggtaagatgtggaagtgttgcctgaagattgtgaggtgtgtgggcttggacatgtagcgctaagagcctctccaactaaagcaaagtaaaactatctgtgtgggaggtagagacgaattagcctggaaaatccatttcaccatttatactgtcccttggctccagtgatgtggacctaaaataggagtttcagcagagatgtgatggtggccccgcagctgtctacaccactgtcaccaacatccctccaaccaggcatacattcatataacaaataccaagtgaatgtctgctgcaagcaaggatctatggatagagcagtgaacagaaaccaagtctgctctcacggagcttgcattcgagtgggagaacgcagaaaataaagaaacaaatatcagaaatcagagtatcagtgatggtgggagggtgtcttttaggtaggtgtgcctatgaaggtctctatgtgcaggtggcctaaagaaaggaaggaagggagccctgagctctcaggaaagactgtcccaggcagcaggaaaagcaagtgaaaggccttagggagcatgtgtcgatggtttgtggaatagcaaagagtggaacaagtgaggggagaggatggggcttgtgttggaaaagttggtactagatcacatgcatcctttaccgtggtacagactttctgttcttcctgcatgaaatgagaagcctcggagggtatggtcaacatgtgagcaccccctacatccccattagctctgtaagtcacaccactccaccactgcattacatcagtgccgggtgataccaaccctgctgttcctccctcaccacagcagcctggacggcaccattgcatcaccgccctcatccccaccatgtgacaatgtcatcattcttccccatcccatgacgaccttgagcactgctctgtgagtcactcagagctgggggctctgcagggaggacagtaggattcagaaacagcccaaccattgccatcagttctgcacagatactccttccctttttgaggctaagaaatcatttagtagagcccagtaaccgagttgctgttttcattccacttactcttttcacatccccccacacctcaccctcccacagaggaaagagagagtcaggtagaaatatgcatggactcggtcctgcttcttccttccacacgaggctgattcattgctttccctcgagtgggagggcccacagtaaagaggttaagtgtctgctgattccttttatgttaaaaataaatatccctgcgaaacagtggcattggtaggctttaccctcagatcttgggaagccaacttcccatctccctggaaatccaaaccaaacaagcttttcttctggtgcaattccagaagtggaaaccaacataatgaggcagctcgaagcacgtacttcttccctcctcttggcagcattcctgctggaggagctgtataaatataggccttaatatttaaaacctcgggccattaatctcctggtgtccctgcttccccagcccgctctccatgcatccccccccccaattcatttttaaagctcagcttgattatgcagccagatagtaatttcagtgaaaaatgacaagttcagtcactgccccaacctatatctcctacatgatttaagttattgctctaattttttgtgaagtccaggtaatttaaagcttgactatgttttactgttccttctccaacctattggacttgccatgatctgtgcattcaaaattcataagaccttctcagtcacgacctggaaagtgaatttaatttttgatcacttatgatgctactgatatttattatgatgccctttttttcccccaagaggatggcaatagagaagagagcacacttaaaaatgttcgactaatggaacttcagaaacctagactgaagtgcaatcaatggtttgggagaggtagggtccctggtgagaatggatttcaaaaccctaatttttcctaaatatacgtgaccagtttatccctaatatctaacaggaggaagtttccccctcaactgtgactgaaccacatcctgctcttgtctcttaccaaaaaagaaaagaaaaaaggggaggggggagagaaaaaaaagaattctctctgaatgaatggctttgtctctgcctattcctagtggttaccttcgtataaaaaacattccaagtacaaactaaaaggttgagtattccttatccaaaatgcttggggccaaaaacatttcagcgttctgaatttttcaaagtttggaatattttcacatacataatgagatatcttgagaatggaatccaagtctaaatatgaaactcatttatgtttcatatatacctcacacacataggctgaaggtaatttatacaaagtttttaataattttgtgcatgatatgaagttttgactgcaatccatcagtcacatgaggtcaggtgtggaattttccacttgtgacgtcatgtcagtgctcagaaagtttcagattttggagcatttcagattttggatttttggattagggatactcaacctgtatcaaagcagagaagcagtagaaagcactggagacagcccctcggtcttgcaaatttggttaactgactggtaggcctgacacctgggctatctattattgtgccagaatggggtgttgggaattcttttctctttcatgctcttaggcagagcaactcattccacaagctccaggacttcctaatatctcacacttatattccctgcatgacctttgtaggcacttgaatttgccacctctattctgaacagtctggaaaagctaccccttcttggtcatccagtttataagccccagaggaccaacgtgggtctgagaccattttctaaaacattgcggcctgaagtatatgacctagggaccacctacatggaatcacctggagatgtgttacatatacagattcgtagccccaacccccagcctacaaatcagacactctggagtgcatttttaatctacaccctcgtgaggtttgagaagcactggtcaagagtcatcccagtgcccagaatcagttctaggagcagctgctgtggctagggacagggtcatgcatggaggtcagtgggcagctggagccatctcccatctgccttccagctcaatgccctgcattgtgcctccatcacaacaaaatagcagagggggccttgagctgataggagacttgagatgcttgctctgtgcccaaatggctgtgtccagtcacttatggctccaggtacttcacctctcagggctgctgtttccttcttgcagaattaagaattaagacgcagtttgccaaatgttctcacttatacatggaatctaaacaaagccaaactcttagaagcagaaagtagaatggtgatgttcagaggccggtggggtgagggtggggtagagatgaagatgacacagatgttcgtcaaagggtgcaaaatttcaggtagacaggagaagtaagttcaagagatccattgtgttatacaacacggtgaatgtagttaacaacaatgtatcgtatacttgaaaatagctcagagagtagattttaagtgttcttaccacaaataaatgataagcatgtgaggtaatgcataggttaagtagcttgacttagctattccacaatgaaagcatatatcaaaacattgtgttgcacaccaaatatgtatacatttttaaaagactagttgagtacagtagtgaaaaaggaggaaagagtagaacaaggagtttgatctgtaactgactgtgaacaatccattgagagaactcactacctttgaaccagcctaaatatgcagtttttataataataaagaaaaagacaaagtgaccaaggtcaattcccagctaaactgtctatcacttctccaattcccactctccagcacctccaaaccgtggggcatctcacctcatactgtagggagagatgggtccagaagtctagttgtggactgaaaaccagtttgccctcccagagctaaagcagagggtttccgtgctggccacatagcttcctcttgcaactagaggtctcagcaccttgaagggacaattcataatcaggggaaaaaaagacaacacaggccttcccgctagtccagtctaaacagatccttcgtgtttgtctggaatgctttgcataggcagccatgctgagggcaagtgagattaggataatccagagtatttgcttgttaagacccttaaacaaaaccggagcgcggaagaaaagcccggtgtaagctgacgagtttgtgagtgcaatctgcggatttgtcggaggtgatttcgccagctaaagggataaactagacagctgtgccgaagagccttaacctgtgaaatatcgttcaaagtacaggctttggaggcagggaggggaggaagtagaggcctcagcaaaggttgtggcatggttcttttgaaatctattagaagaaggaaggaaacaggctcagagagattcccactgcatgtgcttaagaggctggagtgtctggcttcgctggagtcaattgcttaagaatctgctctgttgtgcttttttttctccacattctctcttcacctccttgttgaccttccaagatcccagctctcccacttctgcacaaaagcaaagacccatttatttattttgttaaagaaaaggaactggagaggtttgatgtcgcaggaaattggagcatctctccttccagtgacaggatcccagaggccatccctgagctaatgactctaagagaaagaatttcccctcagtgaagggccattagcaagagctggtgtccaggttctcagaagtcactgggatgcccgtaattgagcagcctcagggcctctgggaaggagccagggtcgaggagattcctttgcacctgcaaagcctggttagctgccccagaccccgggcccagcattaatagaatcctcctggcccacagcatccctcttgctctcattatccaaagcctgggacattcttatgccctggacttgctcccagatgaggaacacactgccagccagtgacaagcccacatctccaaggcgtcccctgagaatcccaggatgtgcttacatcacacagcctagagtttgcaccagaccagacagagacttaagtcactgctcaaaagctcctttcaggtcagggaggaaaagtcactggggaggtgaaatgactctggactttctgggagaaaaatgagcagctgctgaggcatgaggcaagaagatgatgcctacaggaaccctggcttgtggttggttgggtgaagccggttcctgtttcatctgtgtcgttaattgcttggtaatgaaacgtaaggccctaatttgactgggctcaattttccacctacaaagtgatggttcacgtgttcacagcctcgtgtcccgatgaagatgccacgggtgagtattctttgaaaaccaagaagagtgatgtaaatgtggtgcactttatcatgaggtagttgaactgaaggctctttaagctccttctcttgcactatgagtaaatgaattgcttgattgattgattaatccttaccattttgaatgtctgaaatgcttgattcacacttaggagtgaccgttatcgcacctttgagccatgttctcagactttaccgttaacgttttcagagacatcagcaagaatcagatatcggatattgctccagatgccttccagggcctgaaatcactcacatcgctgtaagtggggcccgagttggggcctgaggtgaggggagggggggcgctggagggaagagagacgcaaccatatttctcaggaggtgtttatcaagactttatgttcccttacacacttgtggcaacctggtaaaagaaacaaatatttcttcaggggaaattgatcttggggaatatttctacaacccaaatgcattatttttattgattaagcgcctggcagctttcccagttattggcttctaattcgaatgcatcttctactccaacctcacgtccccctcccaccccacgtccccctcccaccccacatgccaccgcagcgctatctttctggtgtaaggagagatggtgatgcgtgtttattaccgcttggccttgccaagggaagagctcgttttcttctgctgattttcaggctttctctccagaccaccctcatggccattgtcctaagaaaacatccaccccatcctatagcccttcctgtctttgattttgaaacccataggcagcccactggttggaaccaaagcttcacccaccaggggttccaagacccctgccggcaggaaggtatagaatgtcctcattctgtcagtcactcatgtgtggcatagggaagtcacttgagccttttatggatgcttcttagtaggcaggatggggacagtgatcccattccctcctaacacatccaatgatgatcacgtgtacagtaaaacagtaattagtagtgtttactgagcattgactgggtaccaggtactgttctaggagtctgtcaagtttagtcctcaccacaacctaaaatataaaatatattgtcatctcatttttacagctgaagaactcagacaatctaagctccaccgagacagggattattatctgttttgttcacggatgtatccctagtaccacaaactgtgtttggcacagagttagtatgtcaaaaaaaaatcttgttttgttcaaccatttacttactctaaaatgtaacttatccaaagtccacagtaacaggtagaaaaggcaagatttgaacccatgctgtctggctccagaacccacactcttgatcagtctgtctatattttgcctctccgtgcagctatgcaacctgtttacctaatttgagtgggcaggtaaccagatgcacatattccccccacctggccccatcccaccgggaaggggatgaggactgggaagtctcagattcagctgttgcctgctgcttgcagagtaaattagtttcatttatcgaatagaacatctggctgggatatcaaagatgggaccatgtgtgagattagtgtctgcttgtgctgaagatcacagaggagaagggagaggagccgtctgccaccaggaacctttctctgcccccaccctctctcttcccttgtctggtttccctcagccaggatttggagacagtctgagggcagtgaggtgcttcctgtctcgtaggaaaaggaattcaaaatctagttgccaaacatgaaattggcatgctgctgcccgattctgaaatatatgtgagcattgtttaagtgaagcacctctcactcccgatttattcattcattcatgcagtagatgcctactgtgtactggcagtattataggcactgcgagtgtggcagtgaactgtacacacaggatccttggcctgacagagcttacagttgaacacaagcacacacaatcccagctcaggagaagccaaggtaaagggctggagagcctttaccccttacctgtgcgtgcattcattcattcaacaaatatttatcgtgctagactcttctattttggggtctagagacccagtcatgaacagccatgtaacgttactacactcatggggcctacatgcaagggagctgggaggtgcgggggagggaggcagaaaaaattaaaattaaatacatatttaagcaacataatgtgacataaagataagcgatatgaagaaactaaaatagggtaacaggtgatataaaacattaactaaaatattaaagagacacctcccaaggaagagatgtttgagctcagacctgaaaggcaagaagaaggtagtcaagccaagacctggggtgggaagccagacaggggtacacccagatgcctgaggagaccacacaggcaggagagcctcagcccgcctccacctgccagggagtggttttgacgcactgggctcagaagcctgctatcccaaggcatggcgggtggtgtgaggacccctcttgccccaagccccgtggcttctgctacactagaagtcctgacatcagctgacacgggcagacagtgacattactgcatttggcacagtgagcggtggggcattaatatgaattacaaatgtgtgcctgagctatcatgctgacttttatttagtcattaatttgttgaaacattaatgaaacacacccgtaggctgatggagacattcactcttcactcccagtggcgtctggaaaaggggggtttggtttatcatgcccatttaccatttccgcatcctaatattttgtctcctcaaagaaggattacagcctggattgcgatccgagtgaaaattgaatattgcatgcattcagtgcacttcagggctctggagaggacttaagaaaaacaaccaaactctcctacgatcagttccctgggtcacagaggaggctggacccaagagacagcaaagcccgtgctgtggttgggagcagagagaggccagccgagcttctctagtgcctttgaagagcaccagcaagggccaggcataaagacgcccctgagcactgtgctggagtgggagacccagtagccttcctccccaggcctcaccaagacaccaaagatgaggcccatgaatcagagacaccagtatgagggtcactggaggcccgtaagagaaaggggtaaaagggttctgagttcctgcgttcctggaactcaaagaataggaaaagcggatagaaagtaaaagctgccattactgtgagacagcaaagctccctggtttttcccgagagccagtccttgactcagcagtccctgcaccatctggagatgaccccagatgcacaaagccctgtctagatggatgattaaatgactcagcttaggaattcctaagatgcaaagggatattaaaaggaaacgtcctgtaggctgggctcaagctgatcaatacccattgaagacacagggccagtctcccacacagtgtatttattgctggggtgtgagtcatattagcagcttagggagataccacaaagagaccgcttcttcctgttggggattatgtattgggctaggttgcccaggaatggagcaggatagagcccatttctactcacctcccagacaacctgcccttccagcccctggctgctcttggctgcctctgtctcgctgatgagaagggattaggcaggccgtggaaggggttgtcctgagatctcatacccagaactggccgaggtgatggcttcctgcaggactgggttctggtggcctcacatccacagtgattgctgtcttctccttctctctttcagggtcctgtatgggaacaagatcaccgagattgtcaagggactgtttgatgggctggtgtccctacagctgctgtgagtaggaactttgtcactgttggtgtctttggtactgtcggaaggctcccacctgaaaacgttgagccatgctctggagagttcttttgactttctgcagacaaaagagaaaaaaatgtttgagctgtccacgcttcacctccgtttcctatttttatgaaaggagagtcagcgagcgggcagaggaagaccgaggtcagtgtgcataaacccaaatgatacagccgagggccctggcccaggcatgaagatactaagcacagggtctggggatagagattaggaaagagtcaaatccaacaaaaagaaaaacatttttcagtagtgtgctaagaatgtaaggaactaaaacatccacacaccaaattccagtactaaagctgagacacagctgctgatggacatgtgaccttgaagaggggtcggggcagagggaataattcgagaggagcataatcagtcaccagtgtgaatccatctgggaaagacagggtggagaggagtgtttacttaatttaaaggaagggttgttgcttcgaattttaagctcagggattatttgtttgcatttatttcattctggtcatttgagcttaaatgtttgaagaagataattgaactctgatgtggagaaggaaggaaaagaatttagctcatagtatagtttaatttttgtgctggtaaaatcatctctgatttgtgacaaggcagctatagcatctacacacatgtactatgggtgtgggagtgtgtgtgtgtgtgtgtgcatgcatgtgcacatttgctctgtcaccattacagttcttctggatgttaggaactgatcttgagtatcctttaagcagtggagaagaccaagtctcggagagatacatgactctcccccagtcacacagcagaataggtatggaaactggaaaagaatctacatggccatgcccttcattcagaaacctcccagccctctgaatagcacatgatgtatgtttgcagaggtgtgcaggtgtgtgtgtgcgtgtgtgtgtgtgtgtgtgtctttttaaaatcacctccaagtcacaggcagtgaggaagaggcctggcacctccccacctcctacgtaaagttcagaggacccacagcatgggtttgtgggccaggactcaagctggggctctaaaggggtggcaggcacaagagcaaagaaggagagaggaacaagggacacatcttatgtggttgatgcccaggaactcttcaagaaagaggaagtgagacttttcctccagccctttcttacatctttcctctacccttcccatgtcctttaagactcagctctggacagattctcccagaacacgcactaatgtgaattatgtaggcgtgcgatgcccagcaagtttccagggagcagatctatcataccagcaaccaggtttgtttcagtgaagctgaaagcaagagagagaaaagtctctctttctctgcatctcccccatctctgtcttcctgtctgccccactctgtgtgtgtctgtgtgggcaaattcctgttcaacggtcccagcctttggtgggcttttaaggctatgtgttagaatgacaggccagggctctgcagggagctgggtgtttcacagatggtattctttgcttgtagcaaagaaactgtgcattataactgccaccataaggctagttaactgtagctattaatcccttgaaagaagagtatcaatagtatccaccttgaggtggatttggcagtgttgtgttccaccaagctggtgtgattttccttttataatctgtgtgtgtgtgtgtgcaggaaggaaaatggctttgcacacattaaggatacacagaatgtgtatcacagtgcctagcacagtgcatgtatacttaaaaagatgtgtatctcagctccaagctaatagcagccatgaggttaatagaaccaacaggactttgcatgggtcgcgaaggcaactccagtttactgtcaccattttgagcagatggaatcgagtagcttggggtaaagaggaagcaactctcctctcttgagaccaagagttgacacaactcaggcaggccttaccagaaagaaccagtaactgggactcaagtagctgtcattgggttttgacctgccattgagtggttggaaagcaggccctgattcgatctaatttagtgttcagcctgctgtagattggacttctccctgttagactggagacactgataagaaggctctgattagaatactctggtagtctgagttattttctctcctttgactcagagtctctttgtgagaggattgcattttttcttctcattccatctctcaaattatgggtactcgcaaagctgaactgcctctgccacacgaagtggccctggacatttcctttctagcacttgctgtgatgctggcggtaataaagtgggtacattgtagttggttctcctgcctgcctcccatcttcccccactcctctggactttttggccatcctatcaaacttgcccagtccagtatgtacacagccagcctcctgggagcttttctcggtgtgttcctttgggcaaatgcccaaaattcttggccattctggagagaatgtctccgtttttttagaggctgcggcaagtgcatccacaaggaacaagccccagctgtcctaagcatgatattctgtccttggtcccctggagcctcacaagttacccccttcagtttaagttccaaaatcttagcgttcaaaggaacatcagggctccaagcacagcctcctacctggctaggacaagaatccctctcatgcacgctctcacaaatccttctgtcactcgtttgctgatggttcctctgataagtcctcactgcctagttggaaggttagaaagctctttcttatactaaacatcgtaatggtttctagaaaactcagaaaagtctgttatcattgtcttcagatgtttgaaaatagctagtatgtctccctataattaatcctaaacacgttcagttcctgcggccattcattgtataaacacgcatttattgtttattactagcaacccttattgtctttgggggatgcaaggtaatctgtcagcttccctccttaaaactggctgctaggaagtgagttggtgcccatttggatactaggaagtatgtttagaattgaaatatcccacatggaggcatctcagaacccaaggtgagaaaaggacatatcactgggcacatgatcccaactccaggggtgggagcagctcaattattagagaaatgacctgtcttcctcctcactggaagctcagggtgaatggtcttgctcctctaccttcccctgcccacccaggctcataggctcctgggacatctgtggagatggtgatcctctatgggcagccagccctcgtgccctgagatccctcaccttgtagctcagaggtccctcctcccaaagcaggaaaaggctgtcatttcctccgctgatggacagctgcaagctgcgttgttacacctcccctccagggagtcaggagcattcatttagtgctcatcgatcacatgacatgcataggaaagccacttaagtcgggagggcagtcatttgaggtggaagcttttaaacccgctccaggtggtcttaaaccaaaccagactgtcttcgggctggaataagttaagacaactctagcacctgttgtttaattttcttggaaggcagacaagaccatttgaggctctcggagtttgccaagcaacatgccaattacagagcagtgagcaaaacttcactccctatagttcacttttccccaccagctgtttcacaagaactacttactactgctaataatagcagctaacatttattgaatacttaatattcttcaggacccgaaactgctaagcaatttcatgtgcatcatctcatttaatctaccacaacgctaagaggaaggtgttgtggaaaggcccattttacagagggggaaactgagggttaagtgacttgaccattgtcacttagcatgatggagccaggattggaacctgggtagtccatgcccttaaccacagcacatccatccagagacatctgcttcacccagtcacaggcagatctgcagagccggttttttgatctgcagagcaagaaattctcaatggatcaagccacagagagggtgctgttgaactgcagatcaactccttttgttatggctcagcataattcacggctctgtgtccatggaactttctctggttcattgtcttcagcccactaatgtttgctctatgagaggatagtcaaggagctgcttgtgtttagagacccaatcgaggtgggacaatgagaattgtctccagcagaagaagcagactgacttggcgatgcgttcttgagggaagggttcttccctctcttgtgtacctggaaagccattgggtagacttaaattctggaatcattccatgctagtcattgaatgaatggttcaccccacttaaaggactgattggtaaccatgtggcaatcagataggaaagttaccaccctaatagtcctgagggaaggaatgggcaagccaccacaggtgaggtcacttgatctggtaaccaaataatagttctccctctctggtctctaggaatctcagctttcatctgtttcccttaggaaaacccagtggcttacagcccattcctagcaccctcctatgtctctggggtagaaagaggtcttgtttttcagacaggccgcccaatggtgttgctgcatgcctggttactcttgcatcgggaatcaccatgacaacccacagccattgacaagcagtgcagtcaccaacaggagagaagggaagagccactgttgcccctagttgggacttggagggctcctcctgtttccccttgagtgtttagcaagacgtggcctacagcacccattttcaagcacagagaagattctgggcagggtcagaattcatggcatcagctgtcattgggttcttccccacatccagcctcagtaggttgctgaaggtctaaattaatccccatattttatagggaaaggatgataacataatgttctaaggtgggagagtggtccctattacaattaatggataaagaaattcaggatgacagagggttaatactagagaaataaaaagaaggaaggcatattaatgcggaaggtttggctctatatcctgtagcttaattaggggtacagaatagctcccctagttggtgtcttcactaagcgttcgtgccaatgtgtagaggtgataactacttccagggacacacagagcacttttttaaataacaaagagccttcataacccactttttgtaaattctcctactaaaggagctagagaaagggttatgccagacgcctattggcgccatctttctcctgttgtatatctgcatctgagtgttcatgaaacagaaacagactccccatccctgttttaggaaaagaaggcccacagagtatctttcttggcaggagcctgggcccatcttcctatcccacagtcttttctggaagagcttcatccattctcctggaagggccactgcattctttcttggcaccagttttctgaggaggccttgctctctggagtttggaatatgctttcagcatttccagacaaataccatagaagtgggaggggcaacataacccatgtcctccacagacccttggtcaagtgtggacgccaccagaatgattgcactgggccactgagtcaacatgtgaattgctggagttgccaaagtgatttttgatgcaattgatcattaagcctgactccagatgtctgtgttttccaaactttgcaaaaaaggcctgtgggctccaagggcaaccttcattgaagagcggatcagagcaaaggcagtagctaacagtggggctcagcgatcttctccccatggggcttttcaaaagcctgggtgtagtgggtccttttagtggatcataatggacctggttttccccctgtgggccatctccccatgttacctggaccccaaatgaaagaagctggaagctgctactagtgataagaacacctgggacttttctgcacaggccagccccggtcccctagcagaaagacttgagtcacgagggttctccctcatcccgacacaggcatttcatttccctcctccagctctagcttttttgactcccagtggcttctgttttctgctttggttttcctgaaggccacagctcccagaaagcaagagctctcagcagcacagctatgctgggtagtcaatgggctgagtgctaatacctcttgacatggaacatatgtggcagccaaaagtgctccaaggaagggggtggcagagggcctcctagagctcacacttggaaataaatttagaaggtgctgtacatgccctcccactctccaatgtgccactctccttaatttcctctgatgggagcatggctctttttgttgttgttctgccttattgtaaaatcacccgctgcgttgatggagtggctacaaacagggtacctccaccgcctcccatcagcctcaggtggctcccttaggctcttagtgagaggggactggctctcacagcagcatgacgattggaaacaaaatctttgggctatgatgtcgtgagtccaaatactatcctacctcttacgggttgtggaactttggtcaaagttatttaagctctatgagccccagaagggtcacctgtcaaagggagattaaatgggagtacctggccttgtgaagtgtgtaatatgcattacctgttaggccatgtggcccctgctgttcacctggtggctgtggttcacctggtcggatcatctcagccttccctctcttttcatttatatgatctccgagggtcctttgagagatagatctggagcaggtggccccaaaagatcactggatctgcatctggggaaataccgatgaatacagtattcaccaggcagtccagcctgactcactggatccaacagcagattgggctgaagtgagatctttggctgggatgtcacagttgtcagtttgagcgccaggcagcctcttgaatgaggccagctgggacatcccaccttgtgtgctattgctgttatctctgtcctacggttgtccctggcctgctcagagtaaggggatcacagagccaggcatatcagctcccacgtcggcattcggtcagtgatcctgaagggggaagccttgcctcgtacagatgcaagccactcagtaaagaacctgccacctcgtgccaacgaaggcttgatcagcatcacacgctgaagctccttcctgggagtcaggaggacttctgatgcctctgcactcccaggaggcaagcagggtcttccaaacccaaccagacctttgtccatctgaagcatacccaggtacagtgaaggctagcaaaaatagccactcctcacacatagggaaaatggaaaagagaatatagactttaaatagtagataagagatggctttggagtgaaacaggctggagcttcgcttattgctgggggaccttggttgagtccgtcaccactctgaacctgttttcttatcagaaaaatgaagataatcatagtgctgttgtgggggttacataagatagtgcctggaaagtgcgtgggaaaagcacacagagatgtagtctgtagagaggatgctgcattattatcatttcacacagcagttacaccaatgctcctcaaacagggatgaaccaggacggagcaagcatcctggaatctctgctgcaaaaagggggaatccatccctccggtgaaagagggaggcctgtgttcaggattccttatagaactgctaaacctcatttcaaatgtttgtttactctctatttgctccataatatggtgcttttaaaattcccctccaactcttgtccatgtaccagatagctaagagctcctttcatggaagccaggctgagttgactagctgccagccttcctcccaaaggaaagagggcacagggacaggctgttagatcttgctgatgctggggaccagtgaggctgtcctcagcatctaattctggataagcagcttaattttatctctccctgcacctacacacctcgcctgagggagccaagcatcctgggagagaatgagtgaccaggagactctgcccttttgtgttttcttttgctccatgcttcatgagctctgcaccttgggctatctttgcctagtaattctgccagcctgggttgttttgatgccttacatatttgaagtaacatcccatgctgagagatctaggagcaataggaaacaaaggagcatctggatgagaaaaaaagagcctcaatagacctgatgagtgagaaggattgccagcgtggcatttagtttttatgaaggcaagtcaagttgccatttctttctccccatggccatcgtccttgtctagtgcctaatatgcgctagaaccaattgctacaattgggcttatgaatctgcactggggtttcaaacctaaatgaccactaaggcaaggaaggtcaagtaaactagtgaaggggacacaatagggaatagtgaggactgtggcaaatagagagcatatgtcctatctaaagggggcagctactccatggctgcctccagggaacctagggttgcctgagctcctgaattttgtttttcaagagaaaatagaaatttgatgtggtgtggtgtggtatggggggtgtgtgtgtgtgtgtgtgtgtgtgtgtgtgtgtgtgtgtgttgtatgaaattttccaatttttaaaacagaggaggattgaaaaaacacatatatgtggcatgacgcaaaatgctgcaataaggattccatcctcaggctatcaaatgggcacctctgacctgttgtgtactgaatagttcagtgtttcttgacaagatgatgtactcagaaggccctgaatgtcaaggtttagaacaaaacactcaccatgtgtgtactttaaaaaaaatcaaaacactgtgtgtgtgaagggtccattcctgagccctggttgctggaccccgttgagtcctccagcttttctccctgtttctctgctctatcacatttccttcaaatgcccccaaaatgcagtgacactgactaaaatttaatacacaaagcatcggaatttgcaggggggagggatgttgcaaagagtatagaccgataggatgggtagacaagacattcgtaaagaagaaactgagccctctagagacctcaattatcataaccgcttccagcatgctccctagaaacatgtgtgaccttgaaaacacctgccaaactctcagcctcagtttcctcccctatcacttgtgagtcaggttctgtccatctgcccaggttcctgtgagaataatgggacgttgggaaagcactttggaaaacacagtattctagcagtatgagcattttttttccactgccaggcaggaggacatctgtgtgaacccttgggaccttgcccattattagacagattaaacaggccgttcttcttccacttgtcactgccacagctgcttgcctgcacgcggggtgcaccgggaccgtggggagtatgaggcccgcagctaagggagaggtggcatggatgatttagcaccatgggcagccccaccgttgccaactgcagaccccctggatcctggtatggagagactcctgaggcaggccagcccggcatccatctcatgtgtcattccccaccagggaggggctgaaccagcctcgaaagtaaaattcttgaaatgcaacatttctgctggttagtttattttccccttcccccagtttcattcgagaggggataagaaatgattttacattgactacaaggcatgtctagtcagtctaggatcagtaaaggtaattcttaggatctcaatgtgcttgacttgccagccctgctctggaaaactgcctgtcaccctcgtggcatcctctgctttcccagacttccacccaaagggtagcttcctatgatgattttttagggagtctgaagagctaaaaacagcttcctcatggataggaaggctgaccctggaaggggtgagggatgggtgccgccttagagaagtgagacccttgaagctgcatatggagttattatacatcttaataaagaataagcactgagaagaaagggaggaataaaatggctgtcattggtgccattatagagctcctaatcctgtgtggaaggccaatggtagatatcctataatcacaaattgcgatgagtgccaggagggaaataaacgggggtgtgagagacgataatggagtgagggtcccattgtagatgagggggtcagggccggcctctctgaggagcggacatttgagctacagtggaaagcaggaaaagaaggcagccctgctgaaagaaggtaaagagggtgttcaaaggtcctagggaaaaatctggtgtgtctgaggaatgaaaatgcagtggtaggccgggcgtggtggctcacacctgtaatcccagcactttggaggccaaggcaggcaggtcacctggggtcaggagttcgagaccagcctggccaacatggtgaaaccccgtctctactaaaaatacaaaaattagctgggcgtggtggtgcacacctgtaatcccagctcctcaggagcctgagccaggagaattgcttgaacccaagaggcggaggttgcagtgagccgagatcacgccattgaactccagcctgggcgacaagagcaagactccatctcaaaaaaaaaaaaaaaatgcagtggtgggactcaagggtagtgagtttggggtgagtggggttaggatgaggttggcgaaagggccaaggtcaaaccacatggggctctgtgctctctgtgggtgtgcacatgtgtgtatgacagagaatccatatgtatgcacatgtgcctgcctacacatagatgcagtttttccaggaggatgacatataactttcatcagatttccagtaggatcagtgatccaaaagaactgtaaggaattttctgaatcaaattgcccgtagtcagtcaactaaagctctaaaacaattatgccaaatgattttttttcctttccaattcctggaagctctgaatcctaaaacagaaagtgaagcacttagggtgccttttcaggtcttccttcaaggccatgggtgcaagagaaggtgccaagtgagagcagtgtatggcatagtgtctgtagtgacagtgtgtgcaggtgcccagaagtgtttggggtttcggtagacacaggaaggcaggtctctctctttttctgttctgcagcaggagctcaaggctgcaaggatgagtgatgggagctttgcagcccatcccctgcaggtgcaacccttgccccgcaggtaattaccaggattagtgaatcaaccaggctctcttctgtttgcagcctcctcaatgccaacaagatcaactgcctgcgggtgaacacgtttcaggacctgcagaacctcaacttgctctccctgtatgacaacaagctgcagaccatcagcaaggggctcttcgcccctctgcagtccatccagacactgtgagtacactgcctcgggtgccagtgggtgcccaagcagcaggagaccccaaatgcccatcatgaaaaacacccaaatgagggcagcacgagcacatccaggaggagttctagagcctgcagggaagctagaataataaaaatcggaatagcttatcagtaccaagcacttacactgtgcttgacaccacatggagtacttaccctgtcttaaaacccttaagcctcacagtgaccctacttggtgctgttactatctcttctttctacataaggaaaccaaggcatagaatggttaggtaacttcctcagggtcacacagctagtaaggagcaggttttgaatccaggcagaggaggtcctgagctaccctcataacccctgtggtcactgtattctgagcagactccatttctgcagatagcccactcctgcccccgcttaaccccctccaccctgcaaaaccaagcatctgaggtgggcactcttcctctatgggaagtatatcctcacttccatgcactacaggtattcataaatatttcacttaaatagatgacctccaagtacagatttcagcccattttttgatggctccagtctcaggcatagacctcagccccatgcccaggtctgcaattagcctcggggcttctggagaccctgtaagtcatctggtgcttgttgcctctgtagccagagacaggaaccaagacacagtaggagcagctgctatatattgacgccgaccacgtgccaaacactgtgttcggtgcttcacagtttttcttactgaggcaggggaagcaagacccatggtgctcttatgatgataaggataattacaacaatacccgctactatatatggaacacccaccatatgccaggcgccgtgccagctgctttatgtgcctagtgtcactgagcttagagaaataaaatgcattctaccccaagtgcaaaccatgactgggtttgtctgtcagaattggcgtgggtgagagtagaagcaatcggtggtgggtcttgccccaagtgggaagagctgggagaccgattccccagaccagatgctagctgcatctgtgactgtcttttgcagacagcaggcctcagaccccctctttgagccctgtctgaaagtagcaccccctaaggcttcctggggcgatgaggcaggaggccagtccttgcagtggattgccagggcccagcgcgaggcagggtggtggtggtggagcaagacgccgtgggtcactcctgattaacggccccatccctctcgcagccacttagcccaaaacccatttgtgtgcgactgccacttgaagtggctggccgactacctccaggacaaccccatcgagacaagcggggcccgctgcagcagcccgcgccgactcgccaacaagcgcatcagccagatcaagagcaagaagttccgctgctcaggtaatcaggttacggggctgggccccgctttctgactcagaatgcagcagccccagagaggccaataatccaatctggaggacagcgagcactgtaatggctcctggggagcatctttgcaaattaaattggggaaattcagttagccctgcagaaaaccagttaccttatggatttaaaataaaacacacacacacacacacacacacaataaaagcatggggaggaggagacggttgcaggggagacaggacccaggcagcagcgtgtctccaagagctaaggagaaggtggggctggggcggcctttgcacatgtgcctgttacaggctaagatttatatttttcgtttccaaagtgtgctccccaaagggcaagtagagaaatacatatagctcaggcgaggctacagacggtgtgtaatcttggggacctcccactcccttcggagacagaccatggtacagccctttgaccacagtatgttataggttccacatgttcacgaaaaacactttcactagcttagctcctccatccctgattactgtgttctgagtacggagagaacagtaaagagtcgtgcttgggaagaaacaaagcctcgttcttctgtgcccaggatctctctagaaagcttccttctcactgcacccaggaaggacatgggggaaaacagcaggggaattctcagcctatcttggaaagagaagtagctctccttgacccgacagctacatgaacaggcagttaaaaattactatcatttgtgttcttttctactggaaaaaaaatcaccaaactgcattgtgcccccaatggtgaaagactgatagcatgaagtgcccaggcgggttgcagccaaccctcacggtgtgtgcagcagcaagagcagtgcttctccccttgcccaggagcttctgatgcaggcgagtcttcccggggagaatgccagcgtggggagaggttactcccaggcagacttgtgcttcttacaacatcttcttgtcctttaagtcaaattctttagtccatgtctccagaatgataagctttagctctttaaatttttttaacagaaactaataccttgggagggcttggagataatacagagactttgtggcactgtgaaaagttggtaccgacttcccttccctagaataatgatgtcagttacaacagccatctttcacctgcgatgagcgtggtactggaggcttctagtctgatttgcttcttccaatggtcctgggaagtcagtaggagagccctttgctctataggagagggaactgaggacttagaggtgaaggggcactccaagttcacaagccagcaaacagcggaggcaggactaaacctcaggttcattttggtcctcacaccacacagcatctgggagagaaggaatatttggggatgacaatcagctgcttggatgacctccttccctggtctcatgctcccacccctacccgctccctgaacactgtcctcaggttccttcctgggcctggcaacatctctggaaagaaaatctcacccaaagcacaatcgtcctatccccagcacctttcctcatgactcacgccaaccttggcctctattcctacccctgtctggccagggctgagttaattagctctgccaaacagtggtacccaaaaagaaggacagtgagagccagaggagggcagggtattatctgccaaccttgaccctttggtctcataagtatcctgttagtactttggaccccaaatggatgtggcggccctgcgtggcacagcagggaaagagtgcaggatccaaggactggtatctccccaggaacacagtcttggcaattttctgggcatgactgtggttgggggtggcaaggtgggggtggggctatagaaagaactaagtaggagaaaaggaaaatggaaagtggacctaggaagcagtagagcttagttctaactctagctctgccactatcgtcctacctgtagatctgcaggatcctggctgcttttcctatgtgggggaggggaagctgaacattttaaaaaagaaacagggagaaggagccaggttcttggattgactctaagataccttttttaaaaaaaaaaacaatgctaagcgaaagattattcctaaaaagtagagatgtttggagctagcatgagactgacacgtagcactctatttgcttttattttatgtcattgcaaagaaagcatgactgctgagctccaaaggccttggctttgagaaacatggggttccagacctgccttggccttggagggaaagaaaaaccatagatgtaaagctctgtgtttccaggaagctccagaagaaagaaggggggcaggtgacacagactggatgtgacagataataactctgcgttttactttttcctaaaagcacccccattgaaaagacagctgatgtaattaggaggcaatttgagggctgctccgtaacacatcctgcccctccttaggcagggcgtctggtttcccagctgcctgtgtctgcctctctctatcagctgcatccgccgccttgggcagcaagatcagtttagggttggatgctgccggctggggtaatctgaccatcagattaagtcctcctgaaaaggctccgtctggctgcctgggaccccaagcccatccctgggagcacttggcagttgcagggtgctgtctgtcttccttcatgcctccccgctttgtgtgagaagaaactctcttgctgaaaagtacagagggtggtgacgcaaagtgtccaaagacggcgaacagcaagatagctctcaaggaattacagaacttttagaaaccttagaggtcatccagtttattctagagatggataaattgaggtccacacagcagaaaaatcttatctaaggtattgagtattatttttagggcaagatctgaaacccaggacttctgacatactgtgaagactcttgataatttacctacaaatccctccatttctttttgtaggaagaaaccaaagagaaagaaaattagattttaaggcttggtgagggtggcggtttgcacgaacaggatggatttcccctgctcttgtaccagggtcctaatcaaactcacatttgaagtcccagaaccacagtgttcacagagccctgcataggtgtcaaagcagagtggagtccagattctagtggctgactctagtgcgtgtgatgagagaccttaggaaggaggagaggccagacagacccagagctgtgggctggctcttcctaactggtccaacatggcagacaacctatgcaccgttgagatgctgagaccatctagaggatatgcccagtcccaaaaacacatagtggaagaatgttgatactggttctcatgtcagaggtcaggcagggagggtctcagtcacttagccttagctccagtttcttcaagatgcacatctccagcctaatgccaagtgggaggaagtcccaagtcagcaggttcatggaaactgaccctgatctatcacagagaggaatataaaaactgggtaccctcacctgggcctttggcatcctgacagtggttattggttcatcctgttcgctcccataatttccagctaaggaagagaacaagaaatcaagaaggaccccagaattcagtgtcttcccctcagactcatcacttggcttccctttccttccttctcttagtctcaaagaggcccttcatcaggaggcgcactggccaccatctctgtgaaagtcagtgttctcaaacaacaactatgattgcaggttcctcagtccaaaccctacggccccatttgttttcctgtctttctctctggctagagagatatattttcttttgacaccccactgctcctctattaaacctcaaatgatctgggatgagtgtctatcagccagagcattcctgctgacctcaaaggatataaaggagactcctgaattgtggaatgtcaaagggggctttttcctaaagaacagcattgaaggtttgctagaccactgggaactgtggattgtctcttgacttaaggggctagaggaatgactgtgatggaaccactcagctgttggggggattgggcctatgttgcaaagcatgcagaagatgcttttctaagtttaatgtcttgtcagaccaactggtgtgactgaatggagtttagaggctcaattcaggcatgtgataggatcacagatgtctgagtgttctttctttccttgggaaggaaccatgctgtcctgaagctcccgagtatgggcatccagtgatttccctcccgttcttctcccttcctactgtgtctccctggggtggggcacaagggcagcagggctgcaatcttcggaagtgttccagtggaaccccactcctgatactaatcacgctcagtgggggcctgctccggcttccgcttctccacgctgcttcctctgagcgctcctgtcctctctctgacgctgcttcctgaccttgactctgaccagtcgctgcggggctttcctttgtgcttgatctaaccatgtggtggaacgatggaaacggaacatggttctgtcaagcaccgcggaaagcaccgtgctctcctgcagcatggcccgccaccgccgccaccaccgctggacacctctcctctgctctggagcaccgcagcccaccacctgccagacccacctctcccagtctcaactcaccaaaggcaggagggtaggagtctcaaaggatgcagatacagagggaaatgggtctggagaagcaccctggggaaagagatctgtatccacatctctttcccaaaatggagtcaccctcccccaaatctagtctggatgtcagacaaggagtaataactaggttcaagctcagaaactactgtgtctcttcttccactggaagggaacaagtatacccaaggcatacgccccatggtttcatgggagagtcccaacccaaggtcatttttccaagtggcagctaacccaaaggggaattcctactgcttgtgacccccgacccctcccaccaccacctttattggtattcactttatttgaaatgaacgtcagcatgagaatgggtgaaactcatgtgagtctgagactttgggtttaacccaaggttccttctgaacctcattcccatactttatgaaaacacagtccctgaaccccatgaaacctaaagtccagtctgtttccttgacctgcaaagcacagttaacgtggaggtgctgggctcctcacctggtgctaattctgtttcaggggaggggagtgtgtgtggacgtggaaacctgctatctctgataataaagagagggatcttggtacctcttattttgcttgttccttgataaatcctagacccagtgtaaccagaagactgtgttgttcattcctgtcctggagtctttgtcctattctgcaagagagagctaaggtgggaactttagcctagctcagaactagaagctgagccctgggcccccatcatgaggtgtgactcttattacctcgtctatctgaggttacccctcagaaccaggagcccaaccattgcttagtagttttttaacatacattgagtgcttgctataggccaggcagtgaactgttttcacatcattaccttgtttaatgttcacaaaatctaaagtcccactttacagatgaggatattgaggctcagagaggttagctaacttacccagggtcatctgattccagaatggctgcactgtactgctgtaatacccaccttcccagctgtggacaaccccattgccttgaattagaacatttaaaaactgtgatttgatagggacttgaaatttgcttaaactctccctttcagactttcatctgttagtagaaagaacttgagtaagagagaaagcattattcaaatggctgttcctctccagcatggacatacaaagatcccatttaacacagagcaaatcctcgagcctggagaagttccctttcccaccttacagagaggggcattctgaggccctcggcactgcccctaacatggcagggaccaggcctctgggagtgggtccataatggtgcccttccatcagtgctttactggccccgcagccacaggctgtgatgaggcagtgccagcctcagaccatgggtatttccctctgttttcaggcagatggctgcactcataatagactccaaaggggatagcttactaggacggctccctgcccaactggtgaccaaactcctagtaaaacagttggcatcttccagccactggcagctggtcccccagccttgcccatgagtggatgtctgtgtgcctggcagtgttctccttagtcattcatcacttatgaccctttgcttattcacatcactgtcttttcaagctgatgaggcctgacaggacttacgctccccccaattcctctttctgcttctttcctcctttcttttattccactcatcttagggatattgggaataggggaggagagctctggaaacatgagttagcaagtccatgatgatcagataacaatgaatttatgactcccagtcagcaaactggctgcccaaaggatgatacaaaatgcataccgttgatggcagcagccatcctggacctggtgctggcctctgatcccaacccagccaagtccattcaaacatgggagcttggctccctacctgtcccacacccctggtcatccaaatgtgacaagtgttcctcctgggaagtggctgtaggacagggatgtataataaaattgtgttgctgtaatttccacctcctacccccacccccccgtctattaaagcttgtctgtgatcacgtaccaagtgtcgttgttctgagctgcccgcgaaaggggaggagggctccaggggcaggagcaggcaagatgccagatgacatcagctcttccaaggctggtttcagccgaggttgagttttatggcccttcttcaaatcctctgggatctcttctgtctgaactcaccccaaagagaagaagcaacagcctattgcagtcggtcctctattactaagtatttctggcagtgacaaatatgcactgagattgaaattgacttttaaagctctggaaaagttaaaaatactttggggtagttatgagcattaggcataacaaatggctctgagaaaccctgagtagtttcggtaatgaaatatgaagtgatggagatggcatttcgggctggctctgactggggaacgaactttttcggttatgtacatacgccgttattaacatttctggctcccactcgtataaaatatcacattccgacccccttgttattacaaaccagggcaataacaaaaacagcagggggaaaaatgctggaaagaacacattagtccatcgaatctaattgcaaaatcatttcattaaaatgggtcagcggctccattgcagaggtccaccagttataatctaactatactactgagagcgattcctgctaactacaggctgctctcaccttgattaaaatgaaaatgcatttaataggcggctgtccccagccacagcccagccggtgcacgccttcaggctcatcgccttgaagagcaaactgttcttcctcctgtctttctgcctttgatcagcagtcagggttccttcgctttgcaaggatcccattatagacacattgtgaaggaaaaatctctgtatgtgtgtgcaatgccccttcgtgccatcactctgtggatccactggtgcggagaacaagagaaggtagtcatctgacagggtttgcaaaatgaaattcgcccaggactcggcacgctgatgggtctggaagaaaatggtgcaggtcagagttaccaaaagggacgaagctggcaagccaagggcaggagatttgcataatacaatgaaccaggaagccactcgaataactgtggggatacgtgcacggagtttgctcacacaagcctagcggtagaaggggagatggaggagcggaaatggagagagagcagagaaggaaaggaggacaggaccaggcttctgactccctgtcttaggtaggtagtgtcacatcagaattagagacccaccaagttcattctcgatcaggaattaccacaaggaaatcacagaaggcatgcaaaactaagagggtgggagagatctgcgtccttcaccaccatagcccactatggaaaaataccccattcaatccacctgcaccaaatctggctagatgatcattcctacagggacctgggaaaacctttggggagaagcaagtctgcagcaaaacatgttaaccacatggaaccagacagcagcctgcgcagactgagtgacctgtgggcctcagtttcctcgtctataaaatagagttatcctaacctcagagtgttgcaaggattaaatgagatcattcatttgaaatggaaagaatagtgcccggctcagtatatgttcagtaaatggccactgttactgctagctacattcatattttcacagcctctgagctgccaaatgttctgccaggttgtagaaaaaaagcagttgctagagtcacaagcatgcataccactcctgaggctctccacctccttaatgttactttcatctgcacaacagcccctggaagataagggcagttatttgattcccattttacatggagagagactgagactagtaagttgccaaggcctgaacgagcctgtgctcccttctgctaaaacccatgaaaagctaatgctcctaaatgcaaataagatcaccaagttgcctcacctagtggagcaaacaaataatgttcacattctctgaaacacttcccaatactcatgtacaggacactcaggtgctcatgacaccccactcgtgcattggacaaatgtggacccatctcttgttttgtgtctcgcattgtgctagtgaaatgttgagtgtgaaaggatgaagaaaacctggccccatcaataagcttatgtctgatgggagaaccagagctccttcagttccaaccagcatgattcaaggtctcacagaggtttgccccagtgcccagggatcatttgtgatcattgaggcaactcgccgaggcatttctcagagacaccacgttgttggtcccattaccattactgtgcaacttcgggagatttgcttttcaaaaaagcaaatctcagctccaacttttagctcatcagaacgtgcctttcactatagttatgtagaatgtgctctgaaaaacagaggccaaatctgaccctcagatacaatttgctcgtcctcgcggcattttaaattggaatttattaccaatattgtttatatggattctctttttaaaaaacaacaaaaaagcaacatcaggcaaccctgagccaaatttccaagcattaaggctggggctccaattccccaggttcccaaccctcgttgtcttcccaatcttacagccaggcgtcgatggtcatttattgccatgtacttggcctgtactcgttttattacctgctggggtaataaaggcccctaagtttgcaaccccttcccataatttacccctacccctggcatagcccccgtcaaagcatcatcaaaatcttgtcatttggattttcatgaacatttagagggtccatgaatgataggagttgtgaagcaggtagaccccctaaaatcgtagactgtacacctgcaccaaggagcacttccccgaggagaacattcataactttcatcagcttctcaaaaacgtctgtgacccccaaaagcataagggcccacagatcttgagtctggtcttcctgaggatggtgatgaataacaaagatccatgggaaggaggcagtaaggctggggacagggaaggcaccagcaaggtggccatatagcaaaggcgatgccgtgtctgttacttgacccctaacagcccccaactcattcccccatctctgtctcccacccccactacccacaacctggggctgtgcgtggaactcgggtgacgctgacgtcccctctttggcccctcccaggctccgaggattaccgcagcaggttcagcagcgagtgcttcatggacctcgtgtgccccgagaagtgtcgctgtgagggcacgattgtggactgctccaaccagaagctggtccgcatcccaagccacctccctgaatatgtcaccgacctgtaagtccaacctcggcgtgaactccctactcctccccacacgccagtcacccggagccagcgtgggcagggtctcctggcggtgaccccttcctggctcagtcatgtggtgtttgttggctgtctttcacatactggtctgaaggtagatacccaggcatctcctgtggacagcttgcttgcaaataaagacagttcattccttcattctacacatattttctgaacacctactgtgagccggcatcatgctaggcccaccagtttctacaacagagcagagcaggtagtccctgccaacccttacggagcttacagtaaaaccagaaagttgggtgctaaatgaagaatggtagtgaagtgagaaaacaactagaatgattaaatatatctgagcctccaattagccatgttaataaagggatgtgttggtttatcaaaaaaaaaagagctaaaaaattatagctgggccatggttggtgggtcatgcctgtaatcccagcactttgggaggccagggggagaggatcacttgaggccaggagttcagtactatcctgggcaacatagtgagaccccactcccttaccccagtctctacaaaaaaaaaaaaaaaattttttttttttattagctgggcatgatagtggcatgcacctgtggtctcagctaccggagaggctaaggcaggagaatcacatgagtctaggaattcaaggctgcagtgagctatgatcataccactgcactccagcctgggccacagagtgagacccggtatctggaaaaaaaaattttttttaattaaaaaatttttgaaaagttatagcctcgtggaggacaaaggcacagcatgtggggaccgacagacatggggctgacacctgactctggcaggcttcctaagattaggccatttgctccttggatctgagactcagtttcttagctgtcaaatgggggagataattaatgcctacctcctacagtggttggggagactaagaaagatgatgcaagcatggaactcatcttgaatcctggcacagagtaagccctggatgagtggtagtggtcttcattattattattattgttgtcctctctaatttcacaagtcatcagaggaaacagcaggcccctttccctgccctgctgctctccctgaatacctgtgaagttcccgagctgctcctggtagagggaagtgcttaggaaggagctgaagggcttggagggttgggagaccctggagaaaccttcctgggggttttaagttgtcattggtatgtccacaaaatgaaaacagatccttggtaattgatgggtgctgaaaacaacgcatgcccacgcggaatactcagaaagtcccctaaaccccagccgaaggaggcttcctccaggagaaggaggaagcagcactgcatatgcctccccaaactgctgggcccctctgttgatgggactgatgtcaaagcttccgatggctctgtggtccttcaccgagtgtgaggttcaggcagcaatgcagcaaagccatggggggtggaaggaggggcctcgtccacagctaacctaccactcatcttgcttcctacacaggcgactgaatgacaatgaggtatctgttctggaggccactggcatcttcaagaagttgcccaacctgcggaaaatgtaagtcaacttcaggaacttggcagcagcctctgttctctagccagagcctgtgttctagactagaggaaccaggggaccggcctctcccccagcctctgctccactccctcccagccttctcctcagccccgctgtggcctctgttaggaagcaagacatgtagacacagaccaaagtgatgcttcatggtttcagttgagtgttatacagagcgagcattccacaccatccctgacccctccctggaccctctgctcaccccacccctacacgccatccaacacctaccccagggctggtgggtgggactcaggtaaggactagcaatggggcacgggtatctaaggtatatgctatttggcaatttttgtgtggtgacagttaaatgtctgttttcaaatggaatcaaaagacccctgcatcagtgatacacatcagaatgaacatgccagcagcttcccacagtgggtttcctccaggagtccgtgggtctgaccatgccttggcctaggcaagggcccacttgcctatgttggcttctccactgccagagatgcagatcatcctaaccctctccctgcacaggagctcagacctagtcataaaggtaatgagaatgatgttggtgcaccagtagagtccttgtcctgagctaaggaccatgctccctgcgtcacacccattgtctcactgagtcttcacccacccatccagtgctggcttcacagtcccctttgtgcaggtgaggaagccagggctcaaaaagtttctgtgacttctctaagaccacacagctaatgggtccccgagctggcattcagacttgggtccacctgcagtcatgctagtgtgaggctggcttgcttctcctcatcttccgtgcggggtcccccagcagaggtaccagcacagaagaggaggctctttaccatctaatccccaggggggcactctttggcccctctgccttaccccaccccctacttcatgtctcctggccccagagttcaggtgtgcctcgaagaccagggaagtaaagtccatcctcatgattcatggattccatatttgagaattcgccgactcactgacatttgtgtaagtccaaagtcaagactctccgtgccttcacagtcattctcgggtgtgcacagaacaacaaaacaaaaaccaaaacaaaaacagagtcacccacacccacgttctcagctggggtcgagcgaggccacgctctgccttcttctgtcacctctcatgctgtaaaccagtgtccttttgcgttatattcagtgccgtgggttttgcatgtttgtggtttttgttggtgattttgctgtttaaaatggccccccagacatactgccgaagggctgtctagccatcctaagtgtgcaaaggctgtgatgtgtcttacagaggacatatgtgcgtgagagcagttttattacaggcttgagttatagtgctgctggccatgagttcaacattatggatcagccatatgtattacataagctatctttaaacagaagcatacatataacaaggttatacgtcgataggttgataaaaatgtggagaccagaggctcgcaggaccctaatcttgtatttccctaagagcaatgctttggtattcactaatgcagtgttcccagcaactgtatacaacataactactgtgagtactggttgagtatcccttatctgaaatgcatgggatcaggagtgtttcagattccagatttttttggattttggaatgtttacatgtacacaatgagatgtcatgaggctgggatgcaagtctaaacacgaaattcacttgtgtttcatgtacaccatatacacagcctgaaggtagctatgtgatatttttaataattttatgcatgaaacaaagttcaagtacattgaaccttcagaaagcaaaggtgtcaggtgtggaattttctacttgtggcatcatatcagcactcagaaagtttcggacattctggttagggatgcttacttataatgagagtggactgtaccacctcgtttttttctcattacccatgctcccacccatcagttccctgtagacaaatatgacagaggccttctaggccctgggcagcatctggatctcactggtgctactcagatcgctttcctccctccgtccctgcctgcagccaccaccttggtcatggctccagcgaatgctgtgtaaccgggtgcagtggagagcacgttggggggccagctgagagaagggcacacttgggtgaggatcatggctgtcactggggtccagtgccccactagcttcagggtcccaacacaaacatcacccatcacctaccaggaattattctttttatttcaaaccagagaaatgtactttgtttttaacctgaagacagaaacttacaggcctgtgggcgtgaggcagatattaagatgaatcaagctggccaagcgcatatttgtcttctgaacaggatctgctagtctttgcttctgcgaagaaatacgtactctcccatttgaggtgaaactcaagcacttggaatctttcatcctcccagttttgataggaacatgagtgtagagaatatttctgtatgccccagaaaacaacagcacaaacacatgataagtgtcaaccaactcccagcatcagcaaccaagcaacaaaagggagtggtgaggtctctggaaaaatatgggcctagatctcatcaaaagggacagatgtcactcagctcatcccagtgcttgccatgttggaataaaagtgagggctgccaaatgtttccatttctcaagagctgccacaactcccggtgtggaaggaaaatgggcagacaagcctatgtgagttctgagttcagctctgcccttcccagttatgtgacaccaggaatgtccttagcctttctgagccttagtttcatcatttacataatagaaataaatccaccttccttataagttatgatgtggatcagaaatatgaggaaataaagatgaaagacatggctgtggtactggggagacagggtgtggaaagacaggagagggcatctgagttgagtgacccagagtagctggttatatatttaaaacaggggttgggttgggcacggtggctcacgcctgtaatcccagcactttgggaggctgagccaggcggatcacaaggtcaagagatcgagaccatcctgactaacacggtgaaaccccgtctctactaaaaatacaaaaaaaattagccgggcgcaatggcaggcgcctgtagtgccagctactcggggggctgaagcaggagaatggcgtgaacctgggaggcggagcttccagtgagccgagatcccaccactgcactctagcttgggggacagagtgagactccgtctcaaaaaaacaaaaacaataacaacaacaaaaataggggttgcacacccagacactttcaggagcctgggagtagcacaaatgtggaacttggctgcgtgcaaggccataaaaataataatagctagcagtgagcacaaattaaacactttaccctgcgctagacagtacagatattaatgcacttaaccctcaccaagaaaccctcaggggctctgaactaacccaaagatggagagaagccccctgggtggccctggttttacattttgtggtttcctgggatctggggcaagatactgctctaagaatgtgatcggctcttacaaaacctccatgcacttgttttgtttctggagtgtttgccccaggctgcactttctgtccttcagctactgctgcctgtagttgcgagcagtgctttgatggatgtagagacggcagcagccagcttttctggaaaattatatccccctcttttttactctccttctgttttccattctcccagcctgaggaaatccaattcacaaaccttacagtaatgtgatgttaattttgctcatttaaagaaacagatgtcaggaaatgggaaccctcccacttcatagctgctttaactcatctgcattgcccatcacttgtattttaatccccaccctccccaacaaagaagctcaactctggagcaaaagccttctcttctggcattcgggtgacttatagctgctggagagcctttatctctcctcctgcatctcatttgggggtaattggcagtctcctcagggcattaccttcattcctgggttatcccagaccagggctaccaggatttataagaaaaccggccaagtttaaggagaaccaggcagggagtggaaatccagtctgcgagtctgctgactgtctcagaccttgggcgagggatgctgggaatgcttactcctgttttcctggcaggatgggaaggagagaaggagaacgaggtcatgccaaggagtaaggagggaaccaaggcaccggctgtttcctccacacctgcccacaagcgcaggcatggcctcaccctgggggcctggtccctccttgggaagagggcagtcagcctgcattgagtccccaattctgtcacttgctccaagtcagtccctaagggagttctcgccccctggcattgttgtgggtcagcccagagctcagaccagggacttggtatggtcctagatccccttccaatgctctgtgacctggagcagtgccctcctgctctgggactcagtatcttcagcagtaaaatggtcctggtctatctctgcgagcccgccaattctgccagctttcgtgtgctctgtgagttcacgggctccacctccacctgcgatttccttgtttgcagaagatggttccccatgcaaggctctgaataggctgtctgcttgggaggctggactctcccctgagctaatataaacactgtcatcaccttcagttcatccatctggccagggatgctttccagggccaggcattttgatggtccacacaagccccccagcaaccctgccagggagaactgctaactcgcagtgctaatggctctgcagcatctgcttgctgttctgatctctcttgaggtctgtgcaggatgtcagcatgcagcctcggagggaagggctgctttcagacctcaggggcagactcagaaatggcagcaccagccaggcatggcggctcatgcctgtaatcccggcactttgggaggccaaggtgggtgaatcacctgaggtctggagttggagaccagcctggccaacatggtgaaaccctatctctactaaaaatacaaaaaattagcagggcatggtggcaggcacctgtaatcccagctactcgggaggctgaggcaggagaatcacttgaaccctgggggcagaggctgcagtgagccaagattgcgccattgctctctagcctgggcaacaaggagagaaattctgtctcaaaaagaaagaaagaaagaaagaaagaaagaaagaaagaaagaaagaaagaaagaaagaaatggcggcactgagggtttgataggaccaagctcactttaagcaaatacaatatccaaaatcttgaattttgtaaagaagtaatatccacatagtcaaaggaatactcacttatgaaagaagaggttcaatggagtacatttgatatgccagaaaacctggcttcaaatcccagttctgtcagctgggtgactgcaagcaagttagttaatctctgtgaacctcagtcccatcatccgtaaaatgagacgataataataaatgagtccgacagccatcgttttgagggtttgatgtggttgtgttggtcagatccctcatgaggtgcctagcacataagaagtggtcaacaatagtaactggaaagcaccaatttatttgtatcagggatccttaactggtgagaaagcttagaagttccacaaatgccctagtcccaaggagtggggagcatgctttatatttttctcctgccttcctcttgaaaatcagtgcttagtgagaatctctaatgaagacagaaaataagtttgagagtcactattttaactctgtcagtcccccagagcattgaaaagacaattacacagaaaaaaacttcaaatcccatccagcctgtttttttaaattgatacataacaattatacatatttatgggacacgtgatattttgatacatgcatgcaatgtacagtgatcaaacaggatatttaggatatccgtcacttctaacatctatcatttctttgtgttggaggtatttcaaatcttttcttctagctattttgaaatacatattgttgttaactatagtcaccctactgtgactgtcaccctatctaacactagaacttattccttttagctcccccattaaccaacctctcttcatctccctcaaaccttcccagcctctggtaaccatccttctactgtctccctccatgagatcaacttttttagctcccacatatgagtaggagcgtatgatatttgccttgctgtgcctggctcatttcacttaacacagtgacctccagtgccattcatgttgctgcaaatgacaggttttcattctttttatggccaaatagtcttccattgtgcatatatacaccacattttcttgatccattcatccactgaccatacagtctgtttcacaaaggtagcttcacctgtatagggccagggtccctgctccctgggccagatgctgaagaccaaagttcagggagccccagactgagctccttccaccatccagtcctcagtctcaggggccccagagagtccccagcagctgcagggcaagtcatcccctcccggcatcaagaccatctgctccttttgattctcccctattctgtttcttccttctagaaatctgagtaacaataagatcaaggaggtgcgagagggagctttcgatggagcagccagcgtgcaggagctgatgctgacagggaaccagctggagaccgtgcacgggcgcgtgttccgtggcctcagtggcctcaaaaccttgtgagtgcctggggtggggcctgggccaagacccagagggagacgggagggcaggggaattagagacagactacgaaggcaagtgggacccaggcactgtcttggcctgctgaatccctctcttcctggagtcagagtcatcagacattctggagccttggatgggaaagaatttagcatgctgaacacctccagcatgcacactcacacacacacaccacacacacacccaacatagtcacccactctcgtgtatacacgtatatagatttataccagaaacttgctgaaggaggcacacaaacagacatttacccacaaacataagcataaggacctttataaaaatgatatatgcagacacgtgcaacatgcacataaacatatatacaaacaggcacagacacacaagcacacacatacatacaagctgatgtctacaaccacgtcttgattctctcttctcttcccagaaatatgtgtgcacaccctagcagccacacaatatgcgtgtgtatacacacatatgcatgacatgtgcttccaagaaagcatgcacaaacaataatgtacatacacatttacacacagccccagtggggctccagtccctgctatcacaggacaaacctgatcaacatggctggactgagcttagaattggcaaaagcatctcacctatacacacacacacaccaccgtggcaccatttgggacagaaaagatcatgcctgtgctctctcatccccacccctctccctgtaggatgctgaggagtaacttgatcggctgtgtgagtaatgacacctttgccggcctgagttcggtgagactgctgtccctctatgacaatcggatcaccaccatcacccctggggccttcaccacgcttgtctccctgtccaccatgtaagttctcctgggtccactgcccacggactctgggatcccactctgcagcgctctctcctcccagctccctgctacctctagccaggctcatctatctgtctgtccacttaaaaactcgtcaggctttctgtatgtgccaggcaggcatcgtctaggtgttgaggctgcacacacccggcccctccttcctggaactcacagcatagtgaattgccacagaaagcatgtccacagtgatttgaaaacccaagctggaaggccaggcatggtggctcacgcctgtaatcctaacactttgggaggctgaggtgggtggatcacctgaggtgaggaattcgaaaccagcctgaccaacatggtgaaaccccttctctactaaaaattcaaaagttagccagttatggtggtgagtatccgtaatcccagctacctgggagactgaggcaggacagttgctggaacccgggaggcggaggctgcagtgagctgagatcatgccactgcattccagcctaggcgacagagcaagattccgtgtcaaaaaaaaaaaaaaaaaaaaaaaaccaggggctttgttgagaaacactggagctgtattctggaaggtaagtgggaggtagctgttgaagaaagtggacagtgcagttccttcagagggaagggcatgtccaagggccctgtggttggtcgcaacagagcatatatgtgggactgaacatctgtcagcatggtcacagtgctgaatgagggagggcatgacataaggcaaggctgaagaggaagccagggtcaggctgcaggactgctgtgggccatctcgtctttgtccagagcacattaggaagactgggacctttaagtagaccttaagtaagacatcaccagacaggggttttaaaaagatgtcactggcagccaggcttggtggctcacgcctgtaatcccagcactttgggaggccgaggcaggtggatcacaaggtcaagagattgagaccttcctggccaatgtggtgaaaccccatctctactaaaaatgcaaaaattgcctgggcgtggtggtggtgcacacctgtggtcccagctactcaggaggctgaggcaggagaatcgcttgaacccgggaggtggaggttgcagtgactcgagattgtgccactgcactccactccagcctggcaacagagcgagagcgagacttcgtctcaaaaaaaaaaaaaaaaagatgtcactggctgctttcagtgggtatcaggaccagaattagaacccagctttctgggcacctaaaggagtgctcctgcccgggtagtgcgctgtcgtgggaagggagcctctgtggaataatgggtaagactctagagccaaatttcctaggttcagatcctggctgtgcctcttgttagctgtgtgaccttgggaaagtgacttcatctctgtgtgtttccatttcccttctgcataatctacctcctaggatggttatgaggattgaatgtggtgatgcttgtaaaacacacagcaagggcctaggtgtagaaagtgctcaacacgtgtgtgttttacagctgctcgtcgtatttccatgtggctctgttatccttagtcgctggtttattgtcccgtctctaaccttccccaaagaccctttagaaggcagaagcaaaggctgctgccacacctcctgttgctgccctatgcctactgcacttggaatcaaagccgaagttagaggagggcctaaaggccggccccacgtcatctggcccctcatgccctgcctgtcccctccctctctccattctagctccgtggggctcctcgccattttcccatgatccaagcccactccaaccttggaacttggcactccctggagcaccctcccccagcctccctccccctagcctctctcccttccacctttgctcaagggtcacctgcctcaccccgttctacccctctgccatagccccaatccctctagccctgccccttaatattacaaagcactaaccatgtcctaacatactgtgtcattcactaacttgctgttaatcatatattatctgcccaccatcatataagatcccgaaggacagggatttgtggctgttttgttcactgctgcatccttaatgtttagatctgtgccaagagcacaagcagatgcccggcatataattgttgagtaaaggaatgaatcgaatgaacgagtgatgtcaacaggagaggacaatgggttgggagctaacatcagtgaactggtccattttagtccatatttagcccctcctaggtacctccacattggaaatccaaagacacctaagatgcccagaagggcagagtcccaaagcattcagggaaccagctctgacccatgaagtaacttgccccgcttcacacagctactgagtgtcagagcctggactccaaccccgaaacagccactctcaagcccttcattgctgtatcatcctacagccactcaagggctgtctgtcccgcttaaataagctccccaagcttcactttcctcatgtgagaaaaggaagataatgttacctccttcatagggtcgctgtgacaggaatgaatgagacaatggatttataaagtgcgtggcatggtcccagtcctgtagtaaacactcaggaagggatagctgccatcatcccctcatctctccatcagtcccattgtttcagtccacagatgcatataaagtgcctgtgatgacataacgctagtttctggatatgcagaggcaaacagaccctaccctcgtgtatgtagagtccaaggtgcaaggcgagcacagaaaccagtcaccgcacactcccatgggtgctatggggagaatgaaagggaatgagggaaaagatatgatagggctgaagtatcccacttgatatgggggactcagagaaggcttccttgatgaaatgtcattgaagccaaggactaaagaatgagaagaagccagccaggcaacctgtaaagatacgggttcccagcaaggagagtagcaagtgtgaaggctctcggggtgaatctctgctaaggacccaaaggcagttcacacagccagggcttggtacccaagggagggcatggcgagacaccacagccacatccatcagaggcgagggtctggaatgagaccctcacagagactgcatctggggaagagcctacgtttccttcctgagacctcctccttcctggctaggagagctgggctctgggcagcagatcccagggccgctcccacagtagaaggatggaggctaagcacccttctctcttcctagaaacctcctgtccaaccccttcaactgcaactgccacctggcctggctcggcaagtggttgaggaagaggcggatcgtcagtgggaaccctaggtgccagaagccatttttcctcaaggagattcccatccaggatgtggccatccaggacttcacctgtgatggtaagaaggctgtgggtcaaggtctgcggggaaggccctgggaaggcaaggaagatggcgaagatgcacaatcagatactccctgagatccaattccactttgctttgggcatgcagctggagctctggagagctctgcagatctgctactagcccacatggctccttcatgcaaattaagaaaaggtgcccatttcagcagtcattttacttccatcagttagaaatctgtcataatatattgatttcattaagacaagacacctgtccattaaaacaagatactgccatctatgagaacactgttgtaccaaatatactcatctatcatgtccacagtgagattggtgccccttaaatgatatggcacccttgtggagtgcacaacctatacaactgtacatgggagccctggcctcagtcttcctgtcagcatcatgatgagactcagtatgtactcatgagaaacagacttcaagaaaagtcttgtcactggctggggatatggatatctgaggctttggttctcaggatcccagagggcatatttatttgcataaattcaagccagcacagttctttacttgatcaactttgggttatctagagacagataattaactgagattaaggcacaatggaggcttgggacatactcaacaccccggagggactgtgtagttgtgggagcagagaaagaaaggagaaagaggaagggaaaagacaaggctctgcccccctccccctgaccactccttcaatcaattcggcttattcctgatatggttaacggtgacctctttcctgttactcttgctgagcctccttgatggtcttcatcttatgtcaaatgaggtaaaaggtaggcgacacccgccaaccacggatgagaccagcgggtaccctcttcctggttctagaacacagcggggacaggggacaacttgtctttgtggagaacacgcagccttgctcactggctccccctagtggggcttatctcccacaaccctcaccctctctggggctctccacaggcaacgaggagagtagctgccagctgagcccgcgctgcccggagcagtgcacctgtatggagacagtggtgcgatgcagcaacaaggggctccgcgccctccccagaggcatgcccaaggatgtgaccgagctgtaagtacccccagctgcctccaagcaccctgtcatctcaccaccagcagcatcctccatactttaccccagaatctcaagcaaggcaacatggcgaaactgccggggggagaccctacttgaatggatcccagcaagatggcagtggagccctcaccaagatggcagccatgggctttgacaagggcacaggaaacatggctcccccagtgcctctgcctggcagaggaggagtctctgaccctgtaattcctaaagataccctgagtataagtgggagggttattgcctcattttccgtatcacccctgaaacctctgctctgtacaccctcttcctaagactcctcagcagtctctcagtctgatcccggcagcagtgcaggataattgtgaaaacattgtccagcgggcaccgtggcttacaaagcacttttctgaataggatcctattccacgttcaaacagccctgtcaagcatgcggccccattttacagatgaggtcttagctctgagtcccattcattctcagaacaggagctttcttattccacaacccgagctcctgccactgactcctcaggtcctgtttctgcaccagaaactcccagctcaacgaaaaaggtgttagcctcttcctgtagggctcttaatattatggagaaaatcctatttctgccccccaggaaagcacagacagaaggacaaggcacggtcccccagtgagggggcctccctggaatgcaccaagagcactgcagctaggaccagaggagcaccacacactcacacaaccaacacacaccatgtgcacactcgcatccatccactccttcactcatccactcaacgcatattgaccaggtttctcaggtatgaagtactctgctcacattggagagacaatggcgagcaaaatgggtgtgacccctacactcacggggctcgtggtttattaaggaaggcagacattcactcgatcattgcagatgcacatgcgaagtgacaactgtgaaaaatgctacaaaaagagaggtacaaggttgctaggacacgcaaagtgagaagtgtgacagagacatgaagctctgagaaagctgccctggtgaaatgatgctagagccgcaatctgaggggtgaggggcaggtcactaggagggaggaggcagtgctctggctgaagttgctgcataagcaaaggccctgtatgggagcgggcagagccagggagaggcaacaggaacagcctaagtgcctgagcagcaacacacccacaaacccacaccacacaccaccacaccacacaccacacatccacaccaccacacaccacacaccaccacacccacaccaccacactcacacaccacacaccaccacacccacaccaccacactcacacaccacacaccaccacacaccgccacacccacaccaccacactcacacaccacacaccaccacacccacaccaccacactcacacaccacacaccgccacacccacaccaccacactcacacaccacacaccaccacacaccgccacacccacaccaccgcacaccaccacacaccgccacacccacaccacacaccaccacacccacaccaccacacaccaccataccaccacactcacacaccacacacccacaccactacacaccaccacaccaccatactacacaccacacccacaccaccacactcacacaccacacaccaccacacaccaccacacccacaccaccgcacaccaccacacaccgccacacccacgccaccacactcacacaccacacaccaccacacaccaccacacccacaccaccgcacaccaccacacactgccacacccacaccaccacacaccaccacactcacacactacacaccaccagacaccacacacccacaccaccacactcacacaccacacaccaccacacacccacaccaccacactcacacaccacataccaccacacccacaccaccacacccacataccaccacaccacacatcaccacacccacacacatctgatgcttgactttgacatctcttttgccaggccccatgcacatccccttttctgggccaggttagcacgtacaggcataccttggagatattgtgggttcagttccagaccaccataaagcacaaactgcaatgaagcaagtcgcacaaatgttttggtttcccagtgcatatcgaagttatgtttatactataccgtagtctattaagtgtgcaatctcattgtgttggaaaaaaaccaatgtaccaatgtacataccttaattcaaaaatgctttattgctaaaaaatgctaatgatcccctaagcctccagcgcgttataatctttttcctagtcgggggtcttgtcttgatgttgatggctgctatctgatcagggtggtggtggccaacattgggtggctatggcaatttcttaaaataagacagtagtgaggtttgtcacatcaatggagtcttcttcatgaaagatttctctgcagtacacaatgctgtttaacatcattttcccatagtagaagttcttttaaaattggagtcaaggtcaggtgccgtggctcacgcctgtaatcccagcactttgggaggccaaggcaggtggatcacttgaggtcagaagttcaagaccagcctggccaacatggtgaaaccccatctctactgaaaatacaaaaattagtagggcatggtggcatacgcctgtgattccagctactggggaggctgaggtatgagaatggcttgaacctgggaggcagaagttgcagtgagccaagatcgtgccactgcactccagcttgggcaataaagtgagactctgtctcaaaaaaaaaaaaaattggagtcagtcctctcaaatcctgctactactttatcaactgaggttatataatattctaaatcctttgttgtcatttcaacaacgttcacagcatcttcaccaaaagtagattccatttcaagaaaccaatttctttcctcatctataagaagcaactccttatctgctcaagttttagcctgagattgcagcaattcagtcacatcttcaggctccacttctaattctagttctcactattttcaccatatctgcagctacttcctccactgaagtcttgaacccctcaaggtcatccatatggttggagtcaacttcttccaaactcctattaatgttgctattttgacctcctaccatgaatcacaaatgttcaaatggcatctagaacagtgaatcctttccaaaagcttttcagtttactttgcccaaatccatcagaggaatcaccatctatggcagttatggccttacaaaatatatttcttaaataataagacttgaaagttgaaattactccttgatccatgggctgcagaatggatgttatgttagcagacatgaaaacaacattaatctgtgtgtacatctccatgagagctcttagatgaccaggtacattgtcagtgagcagtaatattttgaaagaaatctttatgtttgtgcagcaggtctcaacgatgggcttaaaatattcagcaaaatatgccataaacagacatgccatcatccagtctttgttgctatatttctacagcacaggcagagtagatttagcataataaaagccctaggattttcagaacggtaaatgagtattggcttcaacttcaagtcaccatcagcagtggcccctaacaagaaagtcagcctgccctttgaagctttgaaaccaggcattgacttctcctctctatctgtgaaagtcttagatggctacttcttttaataaaaggctattttgtctccacggaagatctgttgtttaatgtggccaccttcatcaattatcttagctagatcatctggataacttgctacagcttctccgtcagcacttgctgctttactttacactttcctgttatgaagatagcttcttttgttttgtttcgttttgttttgagatggagtctcgctctttcacccaggctggagtgccgtggcgcaatctcggctcactgcaagctccacctcctgggttaatgccattctcctgcctcagcctcccccttagctgggactacaggagcccgccaccacgcccggctaattttttgtatttttagtggagacagggttacaccatgttagccaggatggtctcgatctcctgaccttatgatccacccgccccggattcccagagtgctgggattacatgtgtgagccgctgcgcccagccggcttcttttcttaaacctcatgaaccaactattgctagcttcaaacttttcttctgcagttttctcacctctgtcagccttcacggaattaaggagagttagggccttgctctggattaggctttggcttgagggaatgtttagctggtttgatttttctatccagaccgctaaaagtttttgcatgtcagcaataagtctttctcatgattcatgtgtatattggactagcacttttaattttcttcaagaactttttatttgcgttcacaatttggctatttggtccaagaggcctagctttgatccgtcttcgtttttgatatgtcttcctcactaaacttcatcatttctatcttttgatttaaagtgagagatgtgtgattcttagaggccgttgtagggttattagttggcccaatttcaatattgtactttgtctccggaaatagggaggtccgaggagagggagacagggaacagctagttggtaaagcagtcagagcacacacaacatttatcaattaaattcatcatctttgatgggcatggttcgtggtgcctcaaaacaattacaatagagacatcaaagatcactgatcacagatcaccataaaagtattataataatgaaaaagttttaaatattgtgagaattaccaaaatgtaacacagagacatgaagtcagatatgctgttggaaaaatggcactaatagacttgcttgtggcggggttgccataaaccttcaatttttaaaaaacgcaatatctacaaagtgcaataaagcaaagtgcaataaaacaaggtacgcagtaccctcagatgtaagtgacagaacgcgacccagactcctccagagttgctttgatctgcccttctaataatgcttttggggacagaacctgaacatgccagtttcttagactagcacatggcgtgaacctccagggttcatgccattttcctggcttagcctctccggtagctgggactacaggcgcatgccaccacgctcagctaatttttgtattttttttttagtagagatggtgtttcaccctgttggccaggatagtctcgatctcttgaccttgggatctgcccacctcagcctcccaaagtgctgggataacagacacattctgacagtatcattgcagtacctgcatccagccctagagcccggtatcttccagtgccttcttcagttatctgagttgataaattctctttatgcttaaggtggtttgaactgattttcttcctctttgcccaggaggaaagctaatataccacttcataagctagctgtaagcattaaaagaccagatgccagtggttcagaagcactcagtcacattagctatgatgattgttatcactgtcatgactcctcctctatgtttttgagtggattttggggccagtcccctgggagttacccacatagagtagaagcctgaaagtgtgcagctggtatgtctcaaaggccgtggtgagtcctgtgacctgattccaggactgcagaggagacattgcatcttggcagagcggtcagcacctgtcccctttctctctgcatcttccatttcaccccactcctcaattcccatcagaggcctctctgggtgaggaagaaaatgcctcatttttacataggccagctccctccagtctgaaatgggtgcagataaaaacatgctagcctgcgatggggaagcaggtagaatgtggtagaaagagcactgggctaggagcccagaggtgagtcccagccttggttctgcctgtgccttggggctactcagcagcatctcttcccactcctgcccccagaagccacattgcagccacacctgtagcttcttgtgattcccccagtgcatatgcctttcctgacttcagggcctctgtccagggcatttatattctcccggcctagaatgttcttcactcccatccctacttaggtaaccccctctggtttctcagtctcagtcctggaagcacaagttaagaggagtgattctgaaaacaaatagtcttgggtttaaattccaactttactacctactgattgcatcactttgggcaagttacttaatctcattcaacctctatttactgatctgtgaaatggggataacagcggtatatccttcacaaggcagagggtgactaagataacataactaaagcacttagccctttgtgcagcacatagtcacggtttgatgaatgtcagtgctgattattaaccttcctttcagaaagccttttgggtggctaagactgggttaggtgcctctcacttgtatccccatggctcttctctcaggtatcgccttgtgttgtagttgcttatttacttatttccccttctagaccaagagctccctgagagcagcaattgtgtctcattcactgtttgttttctttccccctccagagttaagcacagcaactaacccgtagcaggcattcctctctgaatctgtcttgtcttcttttttttttttttttttgagaccgagtcttgctctgtcgcccaggctggagtgctggaatgcagtggtgtgatctcggcttactgcaagctctgcctcccgggttcacaccattttcctgcctcagcctcccgagtagctgggactacaggtgcccgccaccatgcccagctaattttttgtattttttagtagagacggggtttcaccatgttagccaggatggtctcaatctcctgacctcgtgatccgcccgcctcggcctcccaaagtgctgggattacaggcatgagcctccgtgcctggaggcacatggattcttgagtgtgtgttgtggctccaggcatttcccaatgctcagaaaaactgaaactagggctgccagcccaggggaaggaagggaggtcttgacagttgctaaaaagttcatgtccaccgtgagtttgagctggggtcatgccctggaagttctgtgtacaaaaatgcccccacgtgcagtgagcttcctgcccttcccttggaccgggctgtgccatgggacggggctgcagagaatgacccagttatactctccttcctgggccaattgagtgccaagtgacacatgtcaaaggacagaaatgccatgacgatagcccgtgaatgcttttccccaaagctcatggaacgaaaactgaaataacaaagataattggctgcaattataaagtaaacttcagcactttgggaggagacctgattttctgatttggaaatggtatcacttcccttggccaggcatggcttccaaagtgcaccgaggaaggcagccctcacttctttccccaaaccgtcttcctggggtggagggttgggggtaagcaggagaatgagtgtcaaagaaagtgaaagctggcagacctggagaattatggctgggagcctctggttcagagacattggctgagtccagatccagggtttccaatgcaagcttttcagctcccttgggtctcattagttatctcaggcagagctgccagcttacaaaacaaaattaagtttaattcaccaagaaaaaacaaaaacaaagttgcccagcatttctctaaagggcagagtgtgagaggctgttgcaagcatgcaagaccccagcaatgccatctgagcaggaggtgatttttttctccagtcagctctctattaaccctcactggcccttctctcacagtctcctttcagttctaccctgggtgagtcaagccaaactgagcctcattctcacattcagtcttgcaagtgctctttgaagtagggctacagtaccagttgccctctttgtctgaccccaaatcctgtgctcatgcccattccaccagaggctcttaaatgtttaggtctcaggactcctttatgcttttcagaagcatccaggactccaagaacctgtgtttatgtgggttatagctattgatattgatcatattactaacactgagaaaatgttaaaatatgcattaattccatttaaaagtaacaattatatacccatgacatgtttatataaaaagcacatttttaagacaaaccaaaagaaatgcaggtgagaagagtttcattgttttatatttttgcaaatctttttaatatctagcttcctagaagacagctcaattttcatatctgcttcaccattcactttgttgtggtatgctttttggatgaaggataagaaatttggcttcacacagaaatgtatttgaaaagggaggagccgggtgcggtggctcacgcctgtaatcccagcactttgggaggccgaggtgggtggatcagctgaggtcgagaccagcctgaccaaaatggagaaaccccgtccctactaaaaatacaaaatttgccagacgtggttgtgggcgcctgtaatcccagctacttgggagggtgaggcaggagaatcacttgaagctgggagggtgaggcaggagaatcacttgaagctgggaggcagaggttgtggtgagctgagattgcgccgttgcactccagcctgggtgacagagtgagactctatctcaaaaaaaaaaaaaagaataaaaagaaagaaaaagcgaggaatactttaatagtcttttcaggtaattatgggtgttcttctttgattaagaccaaagctcaacaagtggcattttcttaaaggctagttgtagtgtggaactgcacttgtaccagtgaacctttggtcctctgttacataactctaccgatctgtcttacgctttgaatggaactttccccatgcacgatcttgtaatatcatgtgttggtcaatggaaaaatatcggttcactgagttatgcagatcttccaaatgctaacacatttcattatacaatatattttttaaataatgtcctttgatatcaccgctgatctcatcagaaaagtctttaagtgagggaaagttgttaagctcaatgtggcagtgaaaagttttccaaaattttaatttttacttggaagcacgaatttatcattggcaacaaatactgtgagctgcttttttttttttttttttttgagatggagtcttgctctttcacccaggccagactgcagtggcgccatctcggctcactgcaagccccgcctcctgggttcacgccattctcctgcctcaacctccccagcagctgggactacaggcgcccgccaccgcgcccggctaattttttgtatttttagtagagacggggtttcaccgtattagccaggatggtctcgatctcctgaccttgtgatccacctgcctcggcctcccaaagtgctgggattacaggcatgagccaccgtgcccagcctgtgagttgctttttttaaagtgatgggcttactttgttcattttcaagaaattatctactaaatagccatgtctgaataatgagtttgccagtctttcttttaggtaaaaacagtgttccatgaaaaaatgtaaaagccagctagttcagcttgcaactcaattacacaggtacttttctctagacaaccaacatgctgtgtgtgtacatctcccattttgtcatacgggacattaaaggaatgtgtgctcaagagttgaatgttaatacaaacaataattcttggtacttcatcaagggcattcctggttttggtaaaacctgcaagtgcacagaggtgaagaatacagtgaccaccagtttcatttggtagcgatgtcctgattcatgctgaggtgccagcagttttaccctccactaattttgtaccatcagtgcaaatgtcaacacagggcaaaaggaaaataacattttaaccttattgtaaatatagttttggcctcatagacccctgaaaaagcctcagggacccccggggtctatggatgacactttgagaaccactctggtcattacatattggtgggcaatggatagagagagataactgctctaagtcagcacgaagttcctaatttaaaaggcaagcttacagaatcttatggaaagcaggacagaagcaaatacaggacatctcagccctcaaagtcaccagaatactctctgtgaaggtagggcctcactgccttcagaaagtacaattattgccatgcaactgtccttttaaattcatgcttacctcactattttagaactgaaacctaaaaatctgcttgcttccatttatggaaatgtttacaaacatcaggtttcctggttctggaaacaaactctgcaaagcctacatcttcataacggttagagaagaaatgcagaatccagtgctggtgaacagctttcccccatatctacccctggttaatatccatgatgtttagacatatatttttggtctaaggacaatgagcatggatttgttgtcctataacttgatatcccaaggaaaagaggggggaaggatgacatagctccaggcacaactattggaagaaaggatttgtattaggatgcggggtctgagaacactgtgggaagcaggctggcagtgtgcatatgcatgtgcatgtgtgtgtgtgtgtgcacagcactgacaggagacaggaaaaggatggggctcaaccaggaggtaggagggcacagggctgagatgcaactctctgagagtgagtgtggcaagaggtgatgacaagaatgcactggttgaagaagcaagaaggacctggcctggcactgtgtgggttccaaggagttaggggatggaggtctggggtccagaaagctcagtggcacttggtcctcatccatagttttattgggggagacatgcaggcaggagaagggggagtgcgacgcagcagatgacaagcacaagggagtggctcaggcaatatgtgctctgggaagagaggaatccaggaaattctgcccacctggcctttaagaaagcaagcaagaatgtcctgcctatgctacaaaccaccacagccaccatttctagagcatttactgtgtaccaagtgctgtgctgggttttcttaataggtaatctcatttcaccctgctaacaactcttcaaggcaagtgtcattattcccattttgcaggtgagataaccggagctactgaaggttgaataatttttgacgatcacactgccaataagcagcagactatagactcaagcccaggtccatctgaccccaagtcctccctgtggcagaaacccaggtccctatgtgttctgcccagtggcctggcttgctgggggcttacatgggtcctcttgaaaactgacatctgcattgcagcagggaggaggcaagcccaggcactctgcattgcagcagggaggaggcaagcccaggcactctgcattgcagcagggaggaggcaagcccaggcagcctgccatgaggctataggtacctgtcagtggttctggctatgtccatcctgacagctgggccttctctagcaaggcaagctgctgcccgagaagagcctgctgcttttcatatcccccatgctccccagagcacttaatagaacaactgcccagcactgactacatccttgacattctctggcccagggagagagactgaaatgtgcctccagccagctggaggggttgatcacatctttggagagtggaccagctctgggcacagcagcacttatgagtcctggcacaggctctggcccagagaagacctcagcagatggcaccagtagaggacacttctccacactattggacagtgacagccatctatgggaggggctgtgggtggcctgagcacaggccgagagctgagaaggctcccttccattcattgagttcattgtgccacacactgtggtagcagctgaaggtacagtggctaccatgacagataagatcccttttctcagaaactgagagtaggggagaaagacagtaagaaaaccgaccagatcaggcatttcacaccaggagtagagggggatttcccaggaaagtaaaggagggaaacagagtagaaagaacatgttttatgaagacctcaaggtggaaagatcttaaattcaagaaaccaagaaggctgtgagatggagcaaataggatgacaaagagggtgatgtgtgctgaaagcttgagaagggatatgtaagttcttgtaggtatagggagagctgactccaagagaaatgcaggaatccaggaagaattttaagtggcatgatccaattctcattttagaaatactaccctggaggaagaagaagagaatgaacagcaagaggaacattatctttcaataagctatgtgtattattggatggagatgtgtgtgtgtgtgtgtgtgtgtgtgtgtgtgtgtgtgtgtgtgtatctatctgtctatatgtatgtgtatgtatatttaaaatgtgttggccaccagtgtgccgggtactgctctgagaactgttcacagagactcaaatttaatcctcagaatcacatcaaggtggtgatcattataagctttgttttacaggtgactaaatgtaagctcaaagaggttaagtacttcacccagggtcacacagctcttagatagtagagccaggatgtgagcctcagctgcctgacccctgagctgcccccacatcactccaggactctagtggaaattctggcctggagcagagtctctgggaaggtggcttccctccctctccattaacatcagctggtttgagttctttgtggggcatcagtcagcaccccaaagctccaaacaggaatggggaacacccattcacagagatctgtgtggagtttcatgcaaggcagatgtgtccttgtgtgtttgcactggggctgaaacagagcatttaaatgcaggccaaatgcaaagggtgacctgccagaaacactccggcagttctaaggctggtggggcaagagggcagtctcctgaaagggtccctctgggagcctggactgtaggctacagacaactttggagttcagagttttcatgaagggcctgctacaaagagagctctccccaccactgcatctgcatttctgatgtgaaagctttgattctgagtcttctgagctgtgctgccaggtcgccggggacattctgcactgaaagcaacttgtgcttggctccatcatgccaaacgcagctctccctgaggagttcaggggttttcatcacacagatgacgtttcctgagcatctgctgttgccaggcagagtgcgagaatgctgtggtgagccaagcagacatgattctgcccacattaatcacagaatcacacgaaagatgtcaccatgggggtcaaatgctgtgatgaaaagacagccaatgctttggctgtcttatataactttaggccaaaagcacttaatagacatttacagagattctacccaacaactacagaatatacattcttttcaccagcacatggaacattctgtaatatcaccagcacatggaacacctgtaatatcattggtaggtgtgggaactgatattgaaaaactaatgctggagctgagatccatgcatctgtaggagttaacctggcaaggagggaggagagacactagtgtgtacaaacacctgccccccaccagaggggatggggcattttaggaaggttaaggccagtggagttggaaccagaggtcaagggaaagtctgataaaagatgaaccaaagacaggaggcagggctctaacagttaatttcctgtctcaactgggtaggctgtggtgctcggttgtttggtcacatacttggtctagatgttgctgtgaaggtattttgtaaatgcaattaatatctacagtcagttgactttttaaacaatatatttaggaggtacaagtacaggtttcttacatgcatatattgtgttgtggtaaagtctgggcttttagtgtacccatcacccaaatactgaacattgtgcccaataggtagtttttcagccctcagcaccctcctaccttttgtagtctccagtgtccattattctactcggtatgtccatgtgtacccattgtcatgctcccactcataagcaagaacatatagtatttgactttctgtttctgagtcatttcactgaggataatggcctccagttccatccacattgctgcaaaagacaggatttcattcttatttatggctgagtagtattcaatgtatatagatattccacattttcttttttttttttaatttttttttattttaagttccaggatagatgtgtgaatgtacaggtttgttatgtaggtatacatgtgccatggtggtttgctgcacctatcaacccatcatctaggttttaagccctagatgcattaggtatttgtcctaatgctctcccttcccttgcatcccaacccttgacaggccatggtgtgtgttgttcccctccttgtgtccatgaatatacaccacattttctttatccaatcctctgttgatggacattgaggttgattccgtatctttgctatcgtgaatagtgctgtgatagacatacaagtgcaggtgtcttttggatgtaattatttatttctctttgggtgtttacccagtagtggtgttgctggatcaaatggtagttctatttttagttctttgagaaatcaccatactgttttccgtaaaggttgtaccaatttacattcccaccagtagcatatgagcattcctttttctccacattctcaccaaaaatctgttgtttttagactttttaataatggtcattctgctgatatgatatggtatctcactgtggttctgattggcatttttctgatgattagtgatggtgagcatttttcatatgtttgaccaattgtatgtctgtttttgagaaatgtttattcatatcctttgcccgctttttaatggttttttttttcttgtcaagttccttatagtttctggatatcaaacctttgtttaggcatagtttaaaagtatttttcccatcctgcaggttgtctgtttactgttgtttcttttgctgtgcagaagctttttagtttaagtcccatttttataattttgtttttactacatttgcttttgaggacttagtcataaatcctttgcctaggccaatgtccaaaagagtttttcctaggttttcttctaggatttttatatttgcatgttttacatttgggcctttaattcattgtgagttaatttttgtatatggtgaaaagtatgagtccagtttcattcttcatcatatggctatccaattttcccagcaccatttattgaatagggtgtcatttccccagtgtatatttttggctttggtgaagatcagttagttgtaggaatgtggctttatttttgggttctctgttctgtaccattgatttatgtgtctatttttataccagtactgtgctgttttggttactatggccttgtaatataatttgaagtcaggtaatatgatgcctccagctttgttctttttgctcaggattgctgtggctatttgggctctttgaattatgaatatgaattttaggattttttttctaattctgtgaaaaatgtaccaaatgacattggtcatttggtagggattgcaatgaatctgtagattgctttgggcagtatggtcattttaacaacgttagttcttcaaatccatgagcatgggatgtttttccatttgtttgtgttgtctacaatttcttccatcagtgttttgtagttctcctgatagacatctttcacctccttggtgaaatatattcctagggttttgtttttgtttttgtttttgtccttgtcttagctattgtaagtgggattgccttcttgatttggtccttgactagatagttattggtgtttaggaatgctactaatttctaaacattaattttgtagcctgaaactttactgaattcatttattaagtctaacagttttttggtcaagtatttagtgtttattttctagatataagatcatatcatcagcagaaatatttgacttcctcttttccaatttggatgccttttgtttctctttgctgattgctctggtgaggacttccaatactacactgaataagagtggtcaaagtgggtattcttgtcttgttccaattcttagagggaatcctttcaacttttctccattaaggatgatgttggctgtgggtttgttgtatatagcctttattatttgaggtatgttccttgtatgcctagtttgctaaattttatcatgaagggatgctgaattttctcaaatgctttttctgcatctgttaagatgatcatatggtttttgtccttatttctgtttatgtgatgcacatttattgatttgcgtatattgaagcatcctttcattcctggaataaatcacaacctgatcatggtctattatctttttgatgtgctcttggattcaatttgctagtattttttttgagaatttttatgtctattgtccattcaggatgttagcctgtagttttcttttttcattgtgtccttgtctggttttagtattagggtgatactgacctcatagaatgagtaagggagaattacttccttctcagttttttaaaatagtttcaggaggattaatactagttttttgtgtgcttgttagaattcagctatgaattcatctttggatttatggtcctgggctttttggtggcagtttagggggggatattttgtattactgattcagtctctctacttattaggggtctactgttcagaagttctacttattcctggttcaatttcaggaggttgcatgcttccgggaatttatccatttgctctagattttctagtttgtgattgtatagttgttcataatagtctgatgatcttttgtatttctgaaatatcatttgtaatgtctcctttttcagttctgattgtatttatttggatcttccctcttcttttcttggttagtttagctagtgatttatcaattttgtttatctttttgaagaaccaactttttcttttgttaatcttctgtattatccttttggtccccatttcatttagttctgctctgatttttgttatttcttttctgttttgttgttcatactagaatccttagtctcagcatgatctttgttatttctcttcttctgctaactttggggttgttttgttcttctttttctagtttcttggggtatgatgttaggttgttaatttgtgatctttctacctttgtgaggtaggtattcaatgctattaacttccctcttagcactgcttttgctgtatcccataggtttgggtatgttgttttttcattttcattcatttggatttttttttaattttaattttaatttctttgttgacccagtggttgttcaagagcacgctgtttaatttccatgtatttggatagtttcaaaagtttgtcttggtattgatttctagccttaaattaccgtgatctgagaaaatacttgatataatttcaggttttttaatgtgttaagacttgttttgtgggctaacttgtggtctatcttggagaatgttccatgtgctggtgaaaacaatgtatattctgtcattgttgggtagaatttctgtaaatgtctattaagtccatttggcctaaagtccaatttaagtccagtgtttctttgttaattttctgtctcaatgatctgtctagtgctgtcagtagggtgttaccaagaccctactattattgtattgtcgtctgtttctttcattaggtccagtattatttgtttgtgttatttgagttctccaatgttggttgtgtatgtatttaggattattacatcctcttgctgaattgttccctttgtcattatctagtgaccttttttgtcttttttttttactgttttatgtgatatgtcttttttatctgatataagtgtagctactcctgctcacttttggtttctgtttgtatggaatatctttttcaacccctttactttcagtctatttgcgtctttatgggaaggataagtttcttgtaggcaggatatagttggatcatgtttctttatccattctgacaatctgtatctttaagatggagcatttaatccatttatattcagggttagtattgatatgtgaggctttgttcctgtcatattgttgattgttttcaagttgttttataaattccttgtttctttctttttctgtctttgtggtttggtgaaattctgtggtgttgccatttgattcctttctcttcttcctttgtataattgttttatatgaactgtgagttttatattttcatgattttttgtgatagtgaatatcgacctttcattttcacatttaagacctcattgaacatttcctatagggttgctctagtggtggcaaattcccttagtatttgcttgtcagggaaggactttatccttaatttataaaatttattttggcagaatacaaaattctgggctgacagtttttttttttctttcagcactttgaaaatgccatcacatttctcttctaacctgtaaggtttctgtgaaaagtcttctgttagtctgaggggtttcctttgtatatgactccatgcttttctcttgctaattttaaaatcctttatttcacttttatattaaacattctgaatataatatgctatagagatatcctttttgcaatgtatttgcctgaagatttctgggcctcctgtaaatggatgtctaactctcttgacagacttgggaaattttcatcaattactttctcaaatatgttttctaaactttttgatctcttttcccccttggtaatatcaacaattcataagtttggtcactttatgtactctcacatatctcaaagcctttgttcattctttttattcttttttccttatttttgtctgactggattattttaaaagacctgtcttcaagttctgagattctttcttctgcttgttctagtctattattgaaattttctaatgtattttgtatttccttcaattaattttttagtttcagaatttctcagttggcttttttttttgtttctttggtttttttttgagacagagtctaactctgtcactcaagctgaagtgcagtggtgtgatcacagctcactgcagccttgaccttccaggctcatgcaatcctcccacctctgcctccctagtagctgggaccacaggcacatgctaccttccccagctgactttttattttttgtaaatacagggtctcactatgttgcgcaggctggtctcaaattcctgggctcaagcagtcctcccactggcctcccagactgctagaattacaggcctgagccactgcacctgggctttggcttttttattttttttaagatgtctgtgtccttggaaatttcttatttatagcctacattgattttttaatttatttgtgttggttttcagatttctcttgcatctcattgagcttctttaagaataacattttcaattctttacctggcatttcaaggaattctttttgattgggatctgttgctggacaattgtggtcctttggtagcatcatatttccctgctgtttcatgtttcctgtgtcattacttggatttctgaacatctggtgtagcagtcacttgttctaattgtttgaaattgcttttgtaggggagaattttctctgaggatatatatatatatatatatatatgttgttgattaagatactttgggtttgattttgagtgcctgtggtagtgtgatctttgtatgaattcctcggcagggcataggatcagtggtctctataatcacatcctcagtgacttagggtaccattattagttgaggtggtggtgaagtttagctggagatttacatgcaaactgagccagtctttgggccccagtactggcagcatagaatgagcagcatagaaggtgggaagccactgtcaatctcaggtcataccccttcctagcaactccctcggatctccctggagaagagatcctccctggaccagcgcttctctgcctgtcctgctcattcctccagctcctgcctccaagctccccatagccacactgtccacagaacacttcctgcaggtgtgtgaattatggcccaacagtttgtcctccccttcttcagcctgcacagagcagagcctccctgcccaaaggaataagctggatacataccccctcccagtgtctgctccttcccaccaccggctgagcccctgcccctgtttggggagtagggcaagcattcactcagaatgcaaataccccacagcctttcatgcagggagggcagagggtgagtacagatgagaggcctgaggaagctctgcaacaccagcctctgcccttgtctgcagtcatggcctctcattgtgctttgaataaaataatctccaaggcctcagcgtgatctaccctgtctcccactgtcctctccaggcccatgagacttcagcccctcagcctgccttctctgccttggaactcaagctctggactgtccacaggctgcattcttgccagactcttccacctcccctgctctttccaagtcttcacccttttcacctaccaatcctcatctgaaaatatgtcctcctcagctgtgcatcttccttttttttctttttctttttttttgagacggagtctcactgtgttgcccaggctagagtgcagtggcaccatctcagctcactgcaaccttggccttctgggttcaaatgattctcctgcctcagcctccctagtagctgggactacaggcatgcaccaccacacctagttaatttttgtatttttagtagagacagggatttgccatgttggccaggctgctctcaaactcctggcctcaagtgatccacttgcctcagccttccaaagtgctgggattacaagagtgagccaccgtgcccagccagcatatttctttttttttttttttttgagacacagtcttgctttgtcgcccaggctggagtgtagtagtgcaatcttggctcactgcaacctctgcctcctgggtttaagcgagtctcctgcctcagccgcctgagtagctgggattacaggcatgtgcctccacatccagctgtattttttgtatttttgtttttatttttgttttgttttgttttgtttgtatttttaggaggggggtttcaccatgttggccaggctggtctcaaactcctgacctcaaatgatccacatgcctcggcttcccaaagtattgggattacaggcatgagccaccacacctggctcttcaactgcatctttctgcagtaagccccttggtgtttccttgctccttcccaagaaagcacagattgcaattcataatttatatttctttatacatctgcctgcttgctctcctgtatgcactgtctctctccctgcctccctccctcccctccctccctccctccctgcctccctctccctccctgcctccctctccctccctcccttcctccctccctctccctccctccctctccctccctccctgcctccctcttcctccctgcctccctctgcctccctgcctccctctgcctccctgcctccctctccctccctgcctccctctccctccctgcctccctctccacctatatttgatttttaattgcctgaaagcaggaattatggctcttattcaccagtatatacgatacttggtacatcataatcgttcaataaatacttgggcttgaatgaatgcatgcatgaatgaatgcatttctcttggcttttctgtctgagggcacaatctaagcatgtgcatgactgaattttaggctccctgagacagaaatggaatctggttcatctttgtatttctcccaggatctagcatagctcttggcccataatgtgtacacaatcgaggatcaaagcaaaaggacatcagtccaatatgccatggccacctaagaccttattaggtccagtccagcaccctgtgccatgagagtccccaggggccagccataggaggaaagttacttggtcttaattaaacaattaaagataatgcacgttccaatgtggccttaaagctaaggctggttcagtcattgacaccttgacccatattctgttttaacccatttctatcccatttagtcattttgtggtaggtctactggacaccaggtagtgtgctagcaccttattactcaaaatgtggtctgcagaccagcagtcaccaccatcacccaggagctcattagaaatgcagattctccaaccttaccccagacctagggtcagaatctgtggtctagcaaaatccaggtgatttgcatgtatgttgaagtttgagaagcaccaggctagcaagagatagacctaggtctagcctcatggagcttaaggcagacacttgacaaatggacagcagtggctatgtgttgactcttataggagaggatgctatgggagctttagatcaccaaggagatcaaagcagttcttgtaagccatcttaaatgttcttcagctttgtcctgagagcaacagaaagcctggagaaaggggtttacagcaagggtggcatgtccccacttgaggatagcattaacttttatttataggtaggaataacctttgtaattcatgattacataattacaatgagacgttcttatcttaagccacacttgagtctctaaggaggcggcctcatcctaggtgagcaggtcagtgtaggatgctgaagtccaggcagatcttagctcagcctttgcatgtccagaaggagtccccatctgttgggtgcaacctcactctgaacccctgtcccctcctgccatgtagtccttctgctgggaactgtagtacagtgctccaacaacagagatagccccccatttcctcagtttccaaatgtacatcagagatagtcaacattgaattagggttcttaatcatgcctggctcagttctcccaacagcttccggaagctaagtgtggaattgtggtaagactacagtcagagctgggttcaagtcctagctcaaccacttgcttgctgcatgaccttgggcaagtgttttaacatctctgaacttttcttcaactgtgacttcctgctacataaggatattttgagggctgagtataaaatgagtgctttatttattaaacaaatatttattgaatacctactatgtatcagctctgtaaacagccacggggggatccaacggtgggcaattttagacaagaatcctgccaacatgaaatgtataagtccagtggagaaaaaaatgtcattcattggataatcaaataaatattaaatgacaaatatagtaatgctttgaagttggggagggaggctctaagagtaaaagagggacctaatccagcctggaaagtcagggaggcttctctgaaaaggtgagaatttgtacagtgtctctttctcaggtgttgtctctccacacctctttcaggtacctggaaggaaaccacctaacagccgtgcccagagagctgtccgccctccgacacctgacgcttatgtaaggagcccagtattgggtgggatgtttatttttccctgctggggtcgctcaggaaactgaagtggatggtaagagagaacagagctgcaggctgatgcaagtggtaattgaaagatgcctgtctgcttaggaccagaagccagtctgcaaagggaaagtgggagatcttgcagaatgaaagagcattacccttgggaaagtaggagaccttctctgaaaagctgaaagaacaccatctctctgtgggatggattcctataaactcctgaaaccagcctctagataaggatttctcaacttcggaactatggacattggggttaattattcgttgttgggaggctgtcatagacattataggatgtttaacaacatctgtggcctctacccactagatgccagtaatacttaccccagtattgacaaccagaaatgtcttcagaccttgccaaatgtcactgagggagcacaagtgcccccagttaagaatcactgctctaaagcaatggtcctcaccatcagctgattagaggaatcacctgagcagatttttttcaagctactgatgctcaagcccatgctagaccaattaaatcagaatacctgggcatggaactcaggcatcagaggatttaaaagctccccaggtgattctaatgtgcagctaacattgccacagctctggatgtttatccccgcagggaagctcgaggttgcagctggcagaggactgcacccccaccaacctcagtcctcctaagacagaacctgataagacggagtaaatgaatgccagaaaagaagggggatagaggaacagtgaaaagaattaatcaggggaaaaaagtactaaaacaaggagagattgttattatatgtatcatattttgttggtacagtgaaatggatgaatagtcatgtaactgaatgattgactagctgcataagtgaatagatggataaatgaatgacagttgcttgaatgattgaataagtgtttgaattgaaaatgaccatttggatgaatgagtgggtggatgagtgagtagataagtgggtggatggatggtgggagggaggaagggagggtgggatggatggatgggcaggcaggcaggtgactgcctgggataaatatgataaatatgtgaggggtagatgggtaagtgggtgggtgggtagatgtatggatggacggatggatgggaaagcggatgggtgagcaggagagtagataaacaggccagcagcgggatggatagatgagtgagtgaattaatgaataggtgggtggatgggtggatgggtagatgagtgggtggatggcaggtatgtgtgatacttgggaatggcctcctacagatgcaactaagacaaaagcatgacccctctgttttacttttcctagtgacctgagcaacaacagcatcagcatgctgaccaattacaccttcagtaacatgtctcacctctccactctgtgagtacactgagatgctgtgtttaccatgcccttgggcctagcagtagatggttactctttccctccctcccagcaggactagtttctctgccctaatgaccctcaggcctatggctgccctagcataagatacaccttaatcatcagaaggaagataaagtaggaagccctccactgtccaggcagttagagaggaactagaacctcgtcgcttctgaagaaggctgtcttaggaataccttttgtggtttgtgaattttctttcccggaaatggttttcctacacaattatattttgctcacacccatttatttcccattagctttacacattgtgagtactcatcattggacaggagagagaggtgacgaacaagctggttagaaagccagcctgccacagaacttgagtaaactgaggaaataaagccagtgcgcttcctggattggtgaagaggtttcttgtccctttaggggatgttctgtcaatatatcaacattgaaaagataaaccatttgctttgtttcacaacgtgaacagtgcacctatgcatggtagagaatagaaagacacaacagggcacatgcctccttttccacaggatcctgagctacaaccggctgaggtgcatccccgtccacgccttcaacgggctgcggtccctgcgagtgctgtgagtaccccaatgtgctgattttgacttacacattgctgagtgacagcaggaagcagactaagcactccccttccccactctctgcccaaagcccactccacccccaaacacaccttcctacccagcacccttatttgctcagtggagtagagagagctacctttgagagtctgccattcccagggtccagcgcactaccactgtggaaccttgagcaaatcactgagccccttcaactttctgcttctttatgtgtaaaatgggatcaatagcacctcctttgtgaggattaggatatgcaattgtattctaccctctagtattgagcatagtgtgtggtcatagccacgtttcgatgatcattctgttgacagttgtttcctcagaggggcaatgcagcatggtgaacctctgcatggaaacagctcctaccccagagatcacaagctggaaacccagggcccccgtccagctcacagacagctattagttagcaattgtggggttggctcatagagtgtctttttaagaacacaaagcttaataagctgtcaacatttaaatatcagatttcttccacaaatcccactctctatattcttttggaaaattgagagacctggccgtaccagggccctacccctgcattcctgcatggctgagcagccctgcccctttaaacagagttgtgcaggctgcagcctccacagccggcccactctcctcgcctgcctggccctgtcctacacatgggtagctgagtgtcttctcatccataaaatcagataattatggtaattgcctcacagggtcttatgaggattaaatgagatactgtatatgaagtacttagtgcagctctggcactgtaaatgcttaacaaatattcacttgttattattcttatatcacagcttgctagggcaggaaggcaccccaccaccacccccaatcctgggcctgattaacacctgatttttgtgccttcccatcttgcttctattttattagcacattcctttgaattcctttggtcctttgaatatcacccttgaatgctattcatgaaaacagagatgccagatactccgcccccaaacctatcaacttcctgactttctagatcattattactataatagtgatcaacatattttatgggacagttttcttcgtctaaccttttgcaacactgctgtgagaccaagacagttctgcccattttaaacatggagaaactgaggcccagactggtgaagtaactggccaaggtctagcagtcagtaggttgcagaatccagcctcctgggacccgggagccattccagggccgagtagcaatccacaaacagcacccaacaagctagtccatttcagagcctccaggctgatgtgatttattgaggcccacaaaacaccggtgtcagtgacaactcccgccacatgtcatctgcgctgttattaaaaatcaattctctgggggcaaagaagtgcccgcgctgacagtgtgcaatctgttattgtcacttatttattatccaccttctctggggagtttgagaatggatacatcagcacaaccatttccctgtttccagttgaacacagcaggagatgggctcgtatcactggccagggctgaagccggacctgctcccccttccttctcctaccattccccctcaatcccaacctattgtcttccatcccagtctaatagttccgtgtgtgggttcactgccaggaggtgggacctgccaattttaaggaatctgcatgcatctgttcataattagagtagtgatgtttggggcaactcaatatgtaagagggagagaaaatgtttgcccgtccatctgtctgtcttttggggtggtgggggtgatggggtgaacaccaccagcctgaccagggttttctctttcctcagcatcatttgtcccagtctggcactactactgccatgagttcatcagcggtacacgtaaccatacaacacgctagcacttgcttcttgaaatacgaattagtaggcttgccccagcatggtggctcacacctgtaatcccagcactttgggaggccgaggtgggaggattgcttgagcccaggacttcaagactagcctgggcaacatagtgaaaccctgtctctaccaaaaaattcaaaaaattagccaggcatggtaacatgcgcctgtagtcccagctacttgggaggcggaggtgggaggatcattggagcctgggaggcagaggttgcagtgagctgagagcacgccattgcattccagcctgggcaatagagccagaccctgtctcaaaagaaaaaaaaaagagaattaataggcttttagcatcatcattttagaatcatgagatcttgtgcataaaaagggatcttagagcacctcagtccaaccatctacctcagtggggagcaaccattttctgcctaagggccaattcaggaaaagtaaaaatgtcctttctcccactaattacacacctaggaatttaggttaaagaatcatccaaaatgagggaagattctgtgcattaaaatctttgttgtactgttatttttaacctaaattttaagtattacctacaagggccacagtggggaaatgtttaaggaaaccatgaggcaaccagtcaatgaagtacaattattaaaagaggcaaagatgaaaactagatagcaatgtgggaaagtgcttatcacatagcgttacatggagaaataaacctaacttgtatatatgttacaattataacttgtaaacatttatacctatgaagaaagactgtaagagagcaaatgaaaaaaattgtgatagttagtgtttatataaagtcatttctataacaaatgaaggcaaagttgaagatgaatgaagaccgggcatggtggctcacgcctgtaatcccagcacttcgggaggccaagacgggtggatcacctgaagtcaggagttcaagaccagcctgaccaatatggtgaaaccctgtctctactaaaaatacaaaaattagccgggcatagtgatgtgtgcctgtagtcccagctactcaggaggctgaggtgggaggatcaattgaggcaggcaagtggaggctgcagtaagcagtgattgagccactgcactccagcctgggtaacacagagcaagaccttgtttcaaaagaaataataaatcaataaagatgaatgaagatggtaacatatttacaactgagggagttggaagaaagattggctttttaaaatcaggaattacattatctgcaactgcatttgaacatttgtatattctttcctcatttctgaggggtttcattcttttaattaaactttcagaaatgaccagagacccagagatgttgggtgtttgcggcagcaagaagaatgagcatcaaggtttagtttgggcgtagacaaaggccaaaaagtgatctggaaagcaggaagagaaaactgacatttaagagagagagagaaagagagagagagagagaatgtgtgtgtgtgtgtgtgtgtgtgtgtgtgtgtgtgtgtgtgtgtgtgtgtgtatgggtggatatgaatacatttcaggagagcacaacaggagggtggtcttttagccctgagtacaaaacattgtgtggaaaatgctttttctacttggctccgaatctgaaaatagcgaaaagagaacattcttgtggacatcttcatccatcttaggggatccatgcattccctgatctttgctccacaccaagtcacatgccttgtatgcgtgtggtcccaactgtcttgccccagtcgcaggagggccacctggaatcagttagctctgggcaggcaatttcagtgtgtgctcacgaaggagccagtgggattatcattcaccatcctcagtatctttagctcctagtccccgaagtaagaattgtgctgtttatacccacggggctgttcatcactgctctaccaattgcctgagttctccttaaaacatccctgtaagggagccctttgcttgattaccttctgagacaaagagatcactcccttaccaggcaactctattccacttttgaccagctattagagcatcagaaaattcttctgctgagccagaaggtgactcactgtgacctcccaaccatggtccagggttggcactttgacatctgtaaaataaaaataagtaaacaaaagtttaattgcagaatttaggattgaagagtgaatattgaaaatttttctgtccaaacgtttcatttataagaagaaaagacaggccgggtacggtggttcatgcctgtaatcccagcactttgggaggccgaggcgggtggatcatgaggtcaggagatcgagaccatcctggctaatatggtgaaacctcgtctccactaaaactacaaaaaattagccggacgtagtggcgggtgcctgtagtcccagctacttgggaggctgaggcagcagaatggcatgaacctgggaggcggaacttgcagtgagcagagatcacgccactgcactccagccttggccacagagcgagattcggtctcaaaaaaaaaaagaaaagacagattcagagaggtttagtgacttgttcaagatcattgtcttattcatcctttcctgaatacctgctaccggttagttgctgtgcttaactctggagggggaaagaaagcaaacagtgaatgagacacaattgttgccctcagggagctcttggtctagaaggggaaataagtaaataagcaactacaacacaaggcgatacctgaaagaagagccatggggatacaagtgagaggcacctaacccagtcttagccacccaaaaggctttctgaaaggaaggttaataatcagcactgacattcatcaaaccgtgactatgtgctgcacaaagggctaagtgctttagttatgttatcttagtcaccctctgccttgtgaaggatataccgctgttatccccatttcacagatcagtaaatagaggttgaatgagattaagtaacttgcccaaagtgatgcaatcagtaggtagtaaagttggaatttaaacccaagactatttgttttcagaatcactcctcttaacttgtgcttccaggactgagactgagaaaccagagggggttacctaagtagggatgggagtgaagaacattctaggccgggagaatataaatgccctggacagaggccctgaagtcaggaaaggcatatgcactgggggaatcacaagaagctacaggtgtggctgcaatgtggcttctgggggcaggagtgggaagagatgctgctgagtagccccaaggcacaggcagaaccaaggctgggactcacctctgggctcctagcccagtgctctttctaccacattctacctgcttccccatcgcaggctagcatctgtttttatctgcacccatttcagactggagggagctggcctatgtaaaaatgaggcattttcttcctcacccagagaggcctctgatgggaattgaggagtgggatgaaatggaagatgcagagagaaaggggacaggcgctgaccgctctgccaagatgcaatgtctcctctgcagtcctggaatcaggtcacaggactcaccacggcctttgagacatacaagctgcacactttcaggcttctaccctatgtgggtaactcccagaggactggccccaaaatccactcaaaaacatagaggaggagtcatgacagtgataacaatcatcatagctaatgtgactgagtgcttctgaaccactggcatctggtcttttaatgcttacagctagcttatgaagtggtatattagctttcctcctgggcaaagaggaagaaaatcagttcaaaccaccttaagcataaagagaatttatcaactcagataactgaagaaggcactggaagataccgggctctagggctggatgcaggtactgcaatgatactgtcagaatgtgtctgttatcccagcactttgggaggctgaggtgggcagatcccaaggtcaagagatcgagactatcctggccaacagggtgaaacactgtctctactaaaatttaaaaaaatacaaaaattagctgggcatgctggcgcacacctacagtcccagctactcaggaggctgaggcaggagaatcgcttgaacccaggaggtcgaggttacagtgagccaagatcatgccactgcactccagcttggcaagagagtgagactctgtctgaaaaagaaatatgtaggctgggcgcagtggctcatgcctgtaattccagcactttggggggccaaggcaggtcgatcacctgaggcctggagttcaagaccagcctggccaagatggcaaaaccccatttctaataaaaatacaaaattagataggcctggtggtgcacatctgtaatcccagctactcaggaggctgaggcaggagaatcgcttgaaccggagaggcaaaagttgcagtgggccaagatcgtgccactgcactccagcctgggcaacaaagtgagactgtctcaaaaataatcataaaataaaaaataaaatgtacctctgcctctcgccctgttttcctaagtggatttcattctcaggcagtctttctctatttaagacacagagggtcctgatgggctgaaagtttacattctagcagcttagcagccccacaaaattaaactgcttctgccctcatcgttccagagagagccccagaagtgtctctccttggctcccttaggttgcatgctcaacctcacaccaatcactgtgactctgattggccagacctgagccataggttcatacagaggccaaaccactgggaccaagaggtggggaggggtaacccccagtagaaaacagaggaacggctacagaaaacagcattgatgctgagaaacccacatcccctaaaaatgtctactatatgtagttactaagaattcctccattttagagatgaaaatatctgagaaaccaaaatatctgagaaaccaaaaaatctgagaaaccaaaagtcaattgtctcagctcacacagccagtatcagacgagggattcacacccaggcagtctgactccagagccttgggttcttaacccccagatcacctgggaatagcttagcctgctcagaagagaattcacccacccacacccacatttagaatgaggatagttcccactgtttattgtattaaccgtaggacctaggggttcagagacccaaggttcgcgcagcccagaactaaggaatggttatgccctaatgttgccctgatggtgccctcatctgcattctgaaattcttaagtttgcctttaacatcccctaagagttaggcaaagaggaggagttccaagtgcttgaagatgagccactgagagttgacagttgcttgccagcccagccgctgggaggcatcagggagaaggggaggagaaaggggaaggagcactcattctcccacttctctagcatcctttaggatggttgtttgacaggcaagagtacttctttgggggccaaaccaggatggagaacctgcagtgtaggcggatttaatgagttgtcctagtaaattataatcctgttactctgcagggtttttttgtttgtttgtttgtgatggagtttcactcttgtcgcccaggctggagtacaatggcacaatcttggctcactgtaacctctgcctcctgggttcaagcagttctcctgcctcagcctcctgagtagctgggattacaggcgcccaccaccacactcggctaatttttgtatttttagtagagaatggagcctgacttgcaggtgtcacaatgctaaagctgcccttgggtccttcggtgttttaaagttaggcctcatgcctctccaggggcccaggcctcatttggaaatgactaacaataaagctgggtgcctatgcaaaacagcaagcagccatgaagccatgcaggcaggggctggtatgattcataaataacctcatgaactagaggctaaatgatgctgataaaagtgttaggaagtgcttctagctcttccttactcggggaggtgagaagctatcgtgaacactctagatggctgtttgccatcttcctgctgtcctagctgcctaagcactgaggctcactttcaccctgagaatttcaccagagaactgtgaggtgggaggagaaggagctgatggtgatgaggatatcaatggagggtaactaagaggagaaagagaagagcagattatatgggaagaggagagaaataagggccttgccttaaagcaataggagaaacctttctaaacccttgctactggcgtcagcatcacctcagagtttgtcagaaatgcagaatctcaggcctcacctcagacccactgaatcagaatctttggaagtggggctcaggaatctgcatattcactagcttccaaagctcactcagtgtgagagccactgttctctatcaagagtaattaggctcatgtctctgtcagctgaagaccaagggcaagctaacttcagttgaagggagaagaagagcaaattcattcgttattattccatctgtacttccactgtcaacactaatcgtctctttgttctactaggactcactgcctgcaataaagttgttagtccttaccctgaagggtgattattgccaacacaggtgatggtgcccatcagtcactaaagaagcctttgagtttctattaatttgcagatttttttatgcagttgatgattaatcctttaatggagaatataatccatgcgttgtggatttgctcgtgttgctacttgagcacggagcagtgttcattgaggtttttcatgcacctatcctccaggcatttgtggaaggcttagtatatggcaccactgtgtaagtgagaatagctcctagctgcctacaccacagggtggagagaggcatgattaataccaagtggggtgcccggcccctccaacgtgctgtgggaagatgcactcaggtgcacacaagtgccagactcgtgtatgtgtgtggctgatgccaaagccgtttccataacaatgagtgttcggctccagagactctcctcgggagctgaggaccccctccctctgtcaccaaagctgggattggtagcatttctcaacgtgcctaagatctctttaggtaaatacgaaggaaactaatttactgacctccttgatacagatacccttcaagactctttcacaaatattaatattgattagtcatttagcacttagaaaatgctggctctctctacgtggattaacacacccatgacaactttccgtggcaagcctttttattctcatacctgttttacaatagaggctgaagcacagagagggtaaattgctttgcccttagtcacacagctggtaagcgacaaagtcaggtttgactcacacagcctggctccagaacttccggtcttaagcacagctcttcatatgatctctgaaactccagtaactcccttgggtctcttcctttctcagctgcaaaaatgaaggcccagaaaagtgacgtaacttatccagcattccacggctaagagagactggtttctgatttcgcctcaggtctatcagattgaaaagtccacccccttcttccgcaaaccctctactccctccatccttgctgctgagctgggcatagaacattcatgcacccagagcaaagggggcagcagctactgctaggagcagtggggctctgagcaaaactgaagggtggcagggccaggcactggaggccctgagaatatgctaaattcaaattagtggatgctaaccttccgacctgtgccctctgcttcagaaccctccatggcaatgacatttccagcgttcctgaaggctccttcaacgacctcacatctctttcccatctgtaagtagcagtgtttctccccaatgaacattcaaaacatgaaagcatgaaagtgtcagcgacaatgtcatcactgtcagcattttggcagatgtcctttccttatgcatacagtatattatacaactatgtatccacactatgcatattgtcttgtttcccacctcagaagccttcaaaggaatcctcaattatgtaaacactgtaaatatttaataagaactaatagaaaacatgtactatggggtaaacactttagataagttttctatttatttcttacaactgtaaggcatttttatccttttattatatataataacattgtgtctaagcatggcacagctagcagatggcagggcccaggatcagatctaggtttgccttgactccaaagcacatattcttaaccactttgcactctgcaacaggtattcccttcttattttacacaggaaaaactgaggcccataaatattaggtgactagctaaagtttgactatcaggtcagtgagatgttggactagaatctagattccctcactcccaggccagacctctcttccacagatcaggaatctctacatttttttatacacctctgtcagtgaacattttcgagtttgtattccttctatatgcatatttaattattttcataatgtgtgcatacactataatacggatatactacgtatgcatattctaaaactttcaaaagtagaattgttaaaggatataatttaaaaaaaaaaacagaatttctagtattttcgtcccagtcacaactgggatgaaagtctagccaagtggtttgaagctgctccctaggttgctgggtttcagaaccttctctgcagagtatatcctccagtggacccttcaacagggcaagggaaccagataatcagatggccagtgatccaggaagctccctaaaggagctaggatggggttgagttgaagagtgagtcttacttgcgtaggtgagagccacgcctcagaagtggaaggggctgggatgggagttgaaacttccacaggattggaagtacactctggagatattaactttgccacagtggagacgactactccgctggccccatattggatacctccagtctagccaaagtctgaaaatgcatttccagagagccaaggatatgaaggctactggccaagctgggcagggggccctgacttcctgttctgcctcctagggcgctgggaaccaacccactccactgtgactgcagtcttcggtggctgtcggagtgggtgaaggcggggtacaaggagcctggcatcgcccgctgcagtagccctgagcccatggctgacaggctcctgctcaccaccccaacccaccgcttccagtgcaaaggtaggtgacgcccacaccccaccctcccctgcccctcttggggtctgctgtgttcccagcaacctgtcagagcagggtatctcaacagatgtggcttcagaaaccttcaccctgtctcttccatgggtcccacaaagaggctcagatgctgacgctgatgtgaaccctcatctaatgggccaagtgtcattctctccaagttccctgctggcattgccacacatctcctcactgacttctttctgtacatgtctttccatagtggagaatatctttttttttttttcatcttttgtagagacaaggtctcactatgttgcacaggctggtctcaaactcctgatctccaacgatcctcctgttttggccccccaaaatgctgggattacaggcataagccactgcacctggccttgagaaaaatcttcaacctgcattttttaatccaacattattaaaacataagcattttcccattttatccagcaaacttttgtacatgtgatttttttattgatcatattataacaacaaactactactgagtttgtatgcaacaggaatgatggtaagcactgtctcatgtattttcttctcattcttcatgtaacaacttatttaattctctaatacctctatgtgatcaacttttaatattatcctcatttttaaaaatgagaaaattgaggcttaccaggcttccaggtccatctgattccagaatgcgcagtctttatcaccaagccataatactccactgccacttaatccatttctggttttgaatctttcgagtatttccatttttttgtcttaccattgacacataaagatctttctctgtttgaaatcatgtcctcagataagactcagagaatagaaattactgaatcaaagtacattattatttttaaggtcttcacacattttgccaaattgattttcaaaaagggttataaccaatttacattcccagtagcatcctttggttgcatttttcattagactctcattattttctcttattttctcattgctaattcaataggttaaaaaaaaaaaactccttttattttgtctttgattattggggaacctgaatttttcatcaaaaacgtacttttcatttgtatacacagttgtttgataatctcttttgctcatctctgagaggcttaatacttattttgatatatagatacactttaattaccctctcaaactttagtgtgtcctacacttctgctgcaagcagaaaaacattccattggcttaaagctaattttaattttcctcctcctgcttctaagctatctgatctgatactaaagaggctcacctaggccaagaacagtataggtctcaatcttggctgcacatttggacatcatacaggagcttttaaaattactgaagcctggctccaccctctaggtttagattaaattggtctggggtacaacctgggtgtggggacttttaaaagcactgcagccagggtccgggcacggtggctcatgcctctaatcccagtactttgggaggctgaggcgggcagatcacttgaggtcaggagttcaagaccagtctgcccaacaaggggaaaccccatctctactaaaaatacaaaaattagccaggtgtggtggcgcatgcttgtaatcccagctacttgggaggctgaggcagaactgcttgaatccaggaggtggaggttgctgtgagccgaaattgcaccaccacactccagcctgggcaacagagtgagactccatctcaaaaaaaaaaaaaaacaaacagaaaacaacactgtagctggtagtgtaaggcagctaagtcatctgggttttgtctgggccattcttggttttagcactgaaagctctgtgtcctgcaaaccccctcagccccaagcaaaccaagacagatagtcttcctcttctaatgtgaagtcgggttgagcccctggtaccagctctcaatcaggccattctttttactcatccacaaacagtcactcactgaagttcatctcagcccatctccaagttgataactgttaaccccaaggtcatttatagtcctgacactaaatatggcctgtttatccagggctcattgtcaaagctggctgcagcagcaggacacagccccctttgcaaagctctgggaaggaccctgacctccctccagtgctcgcagctaaagcaagcacacggctgaaacggtcacagacgtaacatgtacctgagcagttttctgtccattgtcagcatcatcgctgtgtcctctggggccatccatttctttcttccaaggttttccaggggggacttcctctgtgtgcctttggcccaagcactgtgccctgcttagcctggcacagactattccatggggaggggtgtttgtgggtagaaaaatgggaggtccgaatggagcctgggcccagagcttcctggaatatgaaaagatacacagggggtttctaattatggtgcattgtttgcagattagcaccaaaatcggatcaggctaattacagtaattgatttgactgcagaagtgtttctgaatgatgtcccactgtgatttttcctcactggacagtggctgaattaatgggactctagctggactggatgtgctggctgaggagagccagctgccatctgggcatggagttgggaaggggctggcgctggctgagggagggcccagagcagaggggaagggaggtatggcagtgagcgcactcaggacctgccatcagtactctggttttgctgcccagggccagtggacatcaacattgtggccaaatgcaatgcctgcctctccagcccgtgcaagaataacgggacatgcacccaggaccctgtggagctgtaccgctgtgcctgcccctacagctacaaggtatgctggaggccctgcccccccgtgttcatgcctcaggctcctccttcagccctggccctagagaggggcaccatgccctgcgtaccctcccttctccaagggacagcctggatgagtccatcgcacaggtcaccactccaaagcagcatttgccagtaacactgttctctgaactagcgggagctgccagtcagagaggcccccatatggtcttgacaaggatgtccagagagaaagaggaaatgtaacatttgtattttctttgtgaaacatggagaaattaagtctcagagaaaaagtgtttccaagtagaggcatcccttgagcccactctcccaatttcccttctaaagggatttccagaacctccaccccaccatgcccctgccaaaccccaccctcagagcaaccagccttgaaagtgctggttccagcttgatgtaaatatagggattggggattgaaaggcctaggggctgcaaactcacccaaaaggttgatcggctaagatcagccagcaagaggatgagatcccagttctcccctctgtcctcccagactacctccaagacagtccttccttctttcacccagagcacggtgtcatgcccctctgctgacccctgtggatatcgaccatgtgcctctcaccagcacctaccgagtacagactgtgccaagtactgtgcttggcattttactcacctgttcaaacacccccagcaaacctaagaaggcctcattattccctttttacggatatggagactgggcctcagactgtcaagagttcaactcaatgtccgaagcttgtaagcagtagagctgtgattaagaccctgggctttgtgattccagaacccaatccttttcccctggagggtttcctggatagctgagcccttccttgggcttcactggaatcagcaaagctgtggctccatcctcttctgcagggcccgcccagcttccagccttcccagggcacccatccaaaggcactgggcaagcgcagagtttcaggacagccccacagcctgtctaatgcacacatctgatgcaggtggagtgagagtgagctggcatccccaggtctctgcccccagtgggattgtgtgtgcgtagtgacaggcttagaggcagcctcattctggggaatgggactacctgatgtatttctagacgatggctgtgcttctagcagatggtgtcagagtgccacctatgggcctgggacaagagagccaaaggattccctttgaagccagccacctccaaagtcttaaacttaccactgagtcccagacccatacaccgtcatttcataagctgattataaaaatcagagaagagactaaatgcataaggtccagatgagtgcctggcctttactgatgattcaaaagagaactatactatgtatggaattgagaatgttataaattcagtcacagggcacccacacacacaaaaaaaataataggaggggagaatagagattaacagcagacatactcaggatgtgtggatcctctcaaactcccttgtatggattcagcagagaaaattcagactgtgcaattacacagagaagcaggtgtggattccagctttgtcatttactagctgtgtagccattgctagtaatttcatctgtcttcccagctgcaaactaggacctgtctcataggtttgccgtaagaatcaaatgtacagtaatgtacgcaatacactaggatgatacctggcattcagtgagcactcaataagctggcatactgctgcctttcacctttacccttgcatggtggtccctcatacctgggtgtggaataggccatcagtaacaggtggtatgttgctagtttgatccaggattatcagtctatggcactgtgaactgccaagaaacttcagtcattctcctagaactgtgactgcatttgtaacattctcaattccatacatagtatagttctcttttgaatcatcaataaaggccaggcactcatctggagcttatgcatttattttcttctctgatttttataatcagcttatgagatgggtagtatcatccccattctaaagataaggtaaactgtttcacattctgattcttgcttccttctctttaaaactggcctgagtctgaaagtagtagagctgggtttgaagtccaggcttcttccagctacacttgactgtactatgaagcatgacctgaccgtcagtgtcagagcaaagagagtatcttcagagctactgcaggataaggccacttgtttgaactttgttctcaagattctgaacatcatgtcaattttagaagaatgtgaacagagattttgatcttgaggaaagtgttgagcccaggcaggtctagggtgcatgatgttgatggtgatggtgaagatgatgatggtgaaggtgatgatggtgatggtatcggtgatgatgacaaaggtgacaatggtgatggtgttgatgatggtaatggtgctaatggtacagatggtggtgatgatgatgataactatgataataacagtaacataagagccagcatttattgagtatctactatgtactgacagtagactaaataaggtacatgtattatcttgcatactcctcatcagagccctagaatacagttcctaaaatgaccctcattttacagttgaagaaactgagcatggtaggtaagggagttgggattcaaagctcagaaccaactgactctagaagctgtgctcctggccactgcactcactgcctgttggcaagtgcagtgattgcaggggctaaggtggaagatccctgactatttaggacctgtctgaatttccaggttagagacaagtagagtgtagccatgggaagaacaccaagcaggaccctctggagcctgtgcctatgtgatgcatgaccttggacagaactcgctcttctcctcacctcagtttcctcagctgtaaaatggaggaggttgaacccaagggatcctttaactgagggttgcatcaaattctctgtgctatgtccctgctttccttcttgccggggttagagcccgcccaaacagagcgactaagatggtagttctgcatgagtggctaacagaaatccccagatacccacaaaaccaagctcaaagttcaggcatttacctctttccaggtatctccattttcccattgactagctgagtgaccttgggaagccacaatattataaaaaagcacaggaatcactgtgtaacatttggtagcagctactcttaatctactataatgccaggcctttgtgaagcagtttaaacacattatctcttgtagtactcttaatcaccttgtgaaataagttttattatcgtcttttaatagatgaaacaactaaggttcagaaagatgaaataatttacccaagctctcacacttaggaagtgcatgagctacaaccagagctcagctatctcttgcaacaaagtctctacactcacaaccactccaagtcagattctccctaagcctcactttccccacctgtaactgagaatactcatactcatgtgcagggctgttggaaggatgaaaaggggctgtgtgtgtactttgcctacctcagtgccaggattcagtagatacttcacaaagggtcagtattttgccattatgttaagatttggggaaaaaatatatctgttggctgattctttttcagccatttagtttcaggcacatatgttcaatgtctcagaacagtgcttctcaaacttttgtgtgcataagaatcactggagagcttattaaaatgcaagttctagttcattagatccgaggtcaggcctgagagtgtgcattttttttttttaatcagctcccaggacatgccagtgccactagtccaaggagcacgctttgagaagtaaggacttagcagcattcctcgtgcgatctcagaaagaggtttccaatgagggcagctgttcccagtgtcttttttttttttttttttttttttttggagacagagtctcactccgttgccaggctggagtgcagtggcataatctcggctcactgcaacctctgcttcctgggttcaagcaattctcctgcctcagactcctgagtagctgggatgcccaccaccacgcccagctaatttttgtatttttagtagatacagggtttcaccatgttggccaggatgttctcaatctcttgaccttgtgatccgcccacgctggcctcccaaagtgctgggattataggcgtgaggcactgcgcccagcccccagtgtcttttaaaggttgattcccaacctttttggcaccagggaccagtttcatggaagacagtttttccacggaactagggtggtgggcatggtctcaggatgaaactgtaccacctcagatcatcaggtattagttagattctcataaggagcgtgcaacctagatccctcgcatgcacagttcacagtagggtgtgtgctcctatgagaatctaacgccacggctgacctgaaaggaggcggagctcaggtggtaatgctcccgccccatctgctcacctcctgctgtgcagcctggttcctaacggggaccggtaccagtccatgtcccaggggttggggacacctgttttaaaggaagccagtcaggattcctggccatgtcctacacacacacacacacacacacacacacacacacacacacacacacacacacaaagtgggatgaggggtagaaagtgtggtggaggaccaaggagcaccacaaatctggtagatttgagcaaaatgaggctgaagagaattgaatcaggctaattaaccaggcgttggcaatagtgattatttttcaaggagaggtaagtgacagaaatccccacttccaggcccaattaccatgtcatcaagcgctaggctctgcctcctggatttctgtgcttggcgtaaagggctgcaggagttgccaccacctccaccaccaccgccatagttgggagggtttgacctggagtcactggtacttaccagttccccagagcaggggctaacccaggcaggggctagagaggtcttgccttgaccttctcaaggttctttgtcctgcccttcacggtccatgtgttggccaccaccactctcatatatgcacctctggaactacttggcaccaaccaaagacctgaaaaagtattttagtcactcacattcagccctgcctcagaccccaagcatcatcatcatcatcatcatcatcatcatcatcatcatcgctattatttatggagctgccattacatgctaggtgtcttacatatataaccattaactaattccccatagggtagttcatattatttccatttcataagtggtaaaaacaaggctcagagagaactagtcatttcctcaaggaacacagcagccaacttagaatgtgcactcccatctgtgtgcccctagaacgcatgttttgagaggggctagccaagtggtcctgcatagaggctcccagcactaactttgggctggatgcctgggttcagctgcttgctccccatttcacttactgctgtgcgatcttggccatattacctcactttctaagtctgtctttcctgtctgtaaaaatagtgtaataacaatcacaccaatctcatagggttgttgtgaacatgatatgcgatcatgaatataaaacacttagcatgaggcctggaacggaaaatgtgctcggcaaagtgggtgagaattagtattacagtttccattccacaccaactttcagaaaggggccctgtgttgttatggtttaggataaaaccagataccagcccaaactgcactctccctgtccccctccaagaaacctctgactggcccctttgctgggacagggcatgaagggaaccagacggacatggcccatgccttccagctgctgaagatgggcctgaggctctggtgtttgagagggtccacagcagaggctgtcctgggcccaaggccttcagcccagttggctgcagcgtcgcagccaggaagccccagttccattccatcacatcaccagcaacagcagaagagggaagaggattttctcaggcagatggcgagcaggtggtgtggcagtgggtgggctcccatgatcacctccaccaggtctgtgccaagccactgagcccagggcccagaaaggatgcagcagtcacctccccaggccccacgctaccaggtcctgtaagggactccatgccaagcattgggtgagactggtctgtcagtcccaaaggagaagcaggagccagaaggccaagaagagtcgggctgttccctgggacagtgggtctcatggagctcagtctccaccttggggctgccttcctcagggccgctgccctcactgctcctgctgcctggcacgctcctctccccaccttccacacagttggctccttctcagctcacacgtccccttcagaggggcctgctccaaagaatcccacaccaccctgagttctctatcgcaaaggttccccacctggcctaaccttaggcttaccttcagaactttagaataccaaagcctggaccccactccagatcaatcaaggatggttctctggggttgtcactttgtaggagacaaggtctgttggccatacttcagccttagtcttccctactcaagttgtgggttatatttaaggttcagtgaggctcatggtaatgttatcttctagcatttacagaatgcctactatgtgctaggtggattacacacgtgtaaccttttccttacatgaaacttttccttacatgaaagctcaagtttaattctcatagcaaccctgtgaggtggacttggagaggtcaagaggcttttatgaggtcacgatcagccaacccagatgggatggagctggaatgtgaaaccagctgtatgtgaattcagctttgcctgaatccatagcctgggctcttgccctgcagtttgggatacagaagggtgcaaattctgcgaagtagtgaggctggaacctgaactcctggcttctcatcactcttccccttcttactgtccagtgactaggggttagggctcccatgggtgggctccaagtcacacagcaggcctttcctaggggctccttgttgtcatctccccagcctcatcacagagaatgctggaacccctggagtcccctgggccatggcagccccagaagtccccctaaccaggtgcttctccctcttttgctcctcagggcaaggactgcactgtgcccatcaacacctgcatccagaacccctgtcagcatggaggcacctgccacctgagtgacagccacaaggatgggttcaggtaacagttcacccctggcctccctcactgtattagtttgctctcacactgctaataaagacatacccaagactgggtaatttataaaggaaagaagtttaaaggactcacagttcagcatggctgggaagcctcacaatcatggcagaaggcaaaggaaaagcaaacatcttaaatggcgggaggcaaaagagagcttgtgcaggggaactcccatttataaaaccgtcagctctggtgagatttattcactaccatgagaacagtatgggagaaactgcccccgtgattcaattatctccacctggccccacccttgacacttggggattattataattcaaggtgagatttgggtagggacccagccaaaccatatcactcaccttggagggctccctgggcaggctaaagaagcagagatacgaccagcgagggcgtgcccagtgcccgtgctgtgctggccctgtatgagaatgatctcaaggctcttcgcaccctgtaagggaagtacaatttatccccactgtgcagataaggaagttcaagcatcagagggacaaatcctctgcctagagttacattaagcattggcacagggatttgaaaccaggtcccaacctcgtgcttcctccaagggaggtgtctgctgctggctaaagtcagagaaggattgggtgaaggcttaaagactgcccgtctggcacttccaccatgcttttctgagttataaaataagtggcatttattatatgctcactatgccaggtaccaactagtcaagtattttctcatttaaatccctacagaccctatccagtaggtaggtattatcttcattgaacagatggggaagctgagacacagaaatggacttgctctaggtcgtatctcctgatgctcattcctggatcttccaggcccacctccagccctctttccttcctgacattaacatttcaagaagaaaagggaatagaagtcacttaggtttttctcctccctgtcctaggaatgggattggcttccacccaacctcaggaccccttcctgcttcccaccttccccagcagcttttagatgcccagtttcactggcctgtggctctgaccaaagcagactgttgggaacgggctcctttggcatccctggtgagccagtcaggaggcggcagccccttggcaataaaggcaggggcaccccatgccaagccatgtgtgggtgtcttagagctcaagttgcaaccaattaaatatcaaaagcactctggccagtgctgccgtgtggtctggggaagaaatcaaattccaggctcccggttctcttcccccgggaacccgcccgcccacgtgtccacctgccaagccagctccatcaaactctgcctcctgaaaagtgaaattcaaggcagagttccttttcctgcctggagtcagccaaaccacccactcctgctggctcacatagagcaggggtgagaagaaactgcagggaaacatggaggtggccacggggccccagccaggaaacacccctccagggcacacagcctgggctgccccacccaggcgagggattgggggggtcagatgagggaagagctccccgctgcaggcaactgtgtttctcccatctcagctggaggttcggttgagcagaaatatctcatttccatcttaagttgttgaagagtttcagatgaacagaaaatatttttagaacttaatgtaaaaggaaaagggcccagatctacaggatcagggaaatggggtggaaggttaaggcaatgaggcagttactagggatgggagagctcgtatgcagtcctcaaggaatagggaaactcttctgcatcgggccagcacctggtgggtgaaggggagtggtgcttgtcaggaagctcccctttgctcccctcttccattctagagtaattccttagggctgccataataaccacagactgggtggctgtaatcaccagaaatttactctctcacagttctgaaggatagaagttccaaatcaaggtgtcagcagggccatgctccctctgagcctctaggggagggtccttgcttgtccctccctggcttctggtgttcctggcaatctttggcattctttggcttgtggctgcagcacccctctctctgcctgcatagtcaccagtgctctctctgtgtctgctttcccatgaccatcttcttttagagacacctgttatattggattaggggtccacactcttttagtaggacctcaacttaactaattacatctgcaaagatcctatttcaaaataagatcacgttctgatgtactcagggttaggacttcaacatatcttttttggggggaacacaattcaacccataacaggtcttagtcatcagcatcaccagcctcttcatacacatgcttctctaatcttgctgcattgcctgctcacaaaaacagcaaaggttggcagagcaggccccacagaagaccaacacaggagatgagatctgctctcatccccacaaccaactcatggcacctggagtctcctggacagctctccaaggtttccaatgaagacagggagacatcagcctccttccaccctgtcactcctttagcaacctctctttcctcgaccagccaccatatctcactgccaggtagccctaaggctctgggggagccaaagtaactggtctttagaaaaacaaatgggcaacaccatggtttaggactttcagaaacctaccctctgtctggctctgaagaagtagcctttttcatgagtgcccagagtccctaacaggaaaaaagaatgagtcattttgctgtaccccaagagctgagacctgagaggcccctggccttttgtagaaaatgtgatatggttttcagttgtagaaaggagaccaattaagtaggattctaggaccactgaaattcactgcctgttagctgagtgtagtttacttttttagctaaatcccaagtcagagcaatctctgaaacctgaaattccagatctgaagctgaagcgcacactcatagatggagtgagaatccctgacaaacgggttaggccaaagaaagatcgagattcattgcagcatttatttaatcagatggatgctcactccacccccgactcccatcccttccgcatggcctttatctgttctaaccgatcttgcacgcccagtcctggggatatgaccaagatcaggcagagatgcaggcagttgaggtttttatccaagagatttaacactctagagacaagtgaaggaaatgcatcttgccgccccacagcgtttgaagccaagttgacccgaaggcctcactcttggcaggcgagggatcctcccactctagccttcatcccccagaagctggaggggctcagaagtagcaagaatacatgatgggaagaaatggcatccctgaagaacagttaaggaagtagggtggttttgtgtagaactatagcttgctaatgggttctgagcattttctatgtgctatgtacccttttaaacattttgcttgtataatctcaatcttcacaaccacccaggtcaaggtcaagtagctagaatgtatcaacaggaattcattcccaggaaacctgggtacagagtctgggaccttggccactatattctgcccaccccctcaccctgagatagaagggctgcctttgagtaaaaaaatcacttaaaggaggatgtttactatgctgtctctctttatttgcaaaagagattgtgcctcagaagagccaaagggagggcagtttggaggacagctggaggaatttaagccatatccaggaaaccacttccagctgggggaatgatgacaccggccttgttggtggacattagccccagagcgaggcagccagcatgggccaggggagatagaacattgcctggagatggggttggatgaaatgaccttttaggttcctaagggtcttcctgctcaggaccccaaggcctcatgtgtccaaagtgctttctcagacctccatctggaggaaaaactaattgtatttcccacccgtgtcttcctctctgccatcccaacccacctctctccctgacccctgactcccctgctctccacccctcacatcccaaagctgctcctgccctctgggctttgaggggcagcggtgtgagatcaacccagatgactgtgaggacaacgactgcgaaaacaatgccacctgcgtggacgggatcaacaactacgtgtgtatctgtccgcctaactacacaggtaaggatctcatgactgtatgtatggtggggtggaggggtgtcgctagaataccattttcttaacttcctccagggactctcttcctctctccctgaggacagagactaagaccccaagactgtgatatgccaagaggggctccccaaaggcctgtttgcttctccgtgtcctccaccaccagccaccagcaaatcactgctccttcccacttgaaacagagtcccaggctctttagctgctgttcatctcattgctggccattacatcctttagggcccctgtagacctagtggtgtttgaggctggcagagaggcgcttgcattgtgtttatgcttccttcaggtctagtcaaccgtctcttgaaatccacattttccagacacttagctaggagctagggatacaaaaatgaccaagacagagttccttctcataagaagtttatagtcaggtggacagaggcgtggattcattagaaagagaacataacatctataagccctggggtgtgggatcacacagaaggaacctaacccagccagagaatccaggaaggctcccacaagagagcattcctcaggaagatcattccacccacctaccccccaaacacaaaacctttattttcctacattaataacccctaaaaaggacagttaaatatatcattagattgtgaagcaaaatgctaccaattttggtgcaaacacagcccgctttgttatgagatcaaccaaagtagcgtatcccagactggaattccatgaatttgaggaaaaatccccatgagacaagaagtttgggaagcactgcatataataataaccttcttcttggtgtaccatgatacaaataagcatattagaggttccaaaaattcctgctttaaagaaagctgtttgtttaacccagcagttcccaaacttatctgatctcagagcttcccctttccccatcctcgaacactattcccagcccagcgatcctgtgttgcaagaagcacttttaggaaataccagcctaaggcaaggagaaaatgaggagggggaagctcagggactcccatgtcctggactactggaaccaggcctttatgtcaggagtgaagtgggtggtgggaagctgtggaagatgaatagaagcatccttgaagatggcagagaaggaagccaaatggctcccattgtccctcatagcccatacctttatcaagcctccagcccatagacagtatccccaagtacactcttgaaactgtaggaacgtaccaccaccaactgagaaaaccacttgctctaataatcctgggcttcctaggaccccagacaagcttctgtgctgggagaaagtgcatggaaatctgctgtgggggcggatgcagtggctcacgcctgtaatcccagcactttgagaggccaaggcaggcagatcacctgagatcaggagttcgagaccagcctggccaacatggcaaaaccccagctctactaaaaatacaaaaattagctgggcatggtggtgggcacctgtaatcctagctactcaggaagctgaggcaggagaatcacttgaacccaggaggtgaaggttgcagtgagctgagatcctgccactgcactcctgcctgggagacagaacaaaactctgtctcaaaaaaagaaagaaagagagagagataaagaaagagagagagacagagagagagagaaagactgactgactgactgctgaggggttacctccccttccctctttcatcttctgagagcggaattgtagccaagagttgcattagcaacaggcaacacttactgtgcacctactgtatacagactactaaattagccacttagagagaccaagaaatctaaggtatgccctcagcccacaagggcttctggtccatgaaaagaatcactgtatagagttgagtcattggtcaagaagaatcagcttagtgccagaagagagatgacagaaatcccagtagtgaaaatggagagggcagtggggctctaacaaaggctttgtggcaggggaggggcttgaactgaatttagagcaggcagatgggcagcaggagggtactgaggaggcattgatgaagtggtttcctgccgcagttgaggcctacctggtgtctgccgttgaccagggtgcactgctgatttgttgcactttggtcctgagagtgagtgcttgtataatctcatttaatctccacaactgccaaagtcaaggtcaagcagctaggaagtgtcaactagaattcattcccgggaaactcaggtacagaatgaggctttgtggtttgctctgtcccagaaaatgtgcaagtcccacacagatacttgtctgcttctctgggtgtctccagatgacaagaaagaggaggcttctcaggaacatagtgccttctgtggtcttgagaggctgaaggcaaaatttggagagggaggggttcagtgctccctcccaggacatggttggggtcagcctctccccaccatagcaaagaacagacttaggggctatctgttactcattaccctgcagccagccctctggacctacctgcctataccctgggagcaggagctaaggcagctttccccgccctgctcccaccccattcctggagagaacgttcatggttagacctttccctctcttagatcactctccatctggcttgacctagtggaatttgaggaaacccaaaactcggatcttaaaagctggtgttgcttgggagctgctgtcctgccttaccgccctcccccacattcctaaaacacattttcaggtggtgtaagcttttcagggcttatctgcaagggccatccctgggtgtttatgaccgttaggtattttgtagcactgcagacttcaaaggcaatgtgtctagagaccagaacttcaaattcctttcatacttccttccctgaaaaatccaaggggcttacttttctgtaacaggtgaactgggctgctaagccttgtctgtgtctctgaagcctcctctgacctcctgggggaggttatgggtcccccttgtgcttccacaaagtttgcccttctggtcacacctacaagtctgtattgtaattgcctgcttatttgtagatcttcccaaataggctgtgggtaggaaaggacccagtcactgttgtgtccccagtgcctggcacagtacctgccacacaggaggtgctcagtaaataagtgtggaatgaaaaaacaaatgaataagcatggcccaaagtgagggccaggcatcctgtgctctcagctgcacctgcccctgcccctgaaagatcaagtaaaacagccaaatggtgatgctaggacagtgtccaggaggacacctggaatcttcccgtggtcactgccaaagaaaccaaggcagaggtgcaggaggatacacaaggagtgagaacacaggactcctgacgtccatgcccacctgaccaggggctggatgagtctgatcttctggccaggatatcccccctagtactctgatcttctggccagggcatccctaccctgcctgaggcctgagctatctcccccatctgtgccaggtgagctatgcgacgaggtgattgaccactgtgtgcctgagctgaacctctgtcagcatgaggccaagtgcatccccctggacaaaggattcaggtaagacctggcttcgtgcccccagcacagagtccatgaaaactctgcctctaacagtctaggttttaggcagtctctggtctctctgcatgctctctctctctctcatgtgcttctctgcatctctgattcagccatgatctaattatctcagtctgtttccctatgcgtgcctctgtctgtctgtgggtgtctctaagtctctgtagatagacaggtaggtagggagagagaaagagacagagagagagaaagatccactctttctcttccctgccccttcttccttgcctctcctctcctaccaacttcccagtactctcagcatatccctcctttctagagctaaagaagtagagcaattccactggggaagcagcgtctaaagggtatttggtcaccttctccatgtgcagcctttgcagtacgctgcccctccagtctacagcaagtttttcagcttatgcacctgttgcaggggaagggggcaggagcactgtggtccagcagcatggccattggcggagctgtctccatggtgagcagcagagcccataggagccaggggagcacgtgagcagccctaagggtggatggagaggctgcctcaggtcagaaagccatgcagctcttgaggctgaggatccaatggcactcctgggaaatccctcccaggccctgtactcatctcttcctttcaccttccttcatgaaagcttttgccactgcctcttctagagaagattgtgagacccttgagactgggggttttctgacatcgagagggagatcccagaactctgtggccaaaaacattcttcccaaccccagtgctgccttctacacccagctgcctccttcttctcccagcaatctctgtccaacaccagaggaaagccactagcaccaaggagtcagggttttgggaaacaggcagtccggggcaactggagagaccccaggatgttagcagaccccataaatgaccttacagagcctcccctagagatgagggccctgggcccagagctccatgcctgtgctgatgagtctttaaggagaatgcccaccagtggcatctccagcctctggggccagaagctcatgctctaggtcttgatgggtccagaagctgtcatcacccagaatctgtcctgttctcagtcacagggcagagagttagactctgggggtatttgtgactatgattctaaacaacaagacttaggacttcagggaaccccaagatctcagaaagcccaatcacagaatcttagaaatttagaatcatagaatctctgaaacttgaacttgtaagctcttagaatcttagaatctaagaagcaggagttctagttgttgctccagccagcccacccatcagtccacagatcttgattgtgtggagtatagtggggattggaagatggttttgattcatctcctcaaggcccttgccatggacctaggggaagaagatttgacactgagcaaatatttagaaaagaaagaagttctaggccccacgattctggctctgttgctggggttctgaggaaggaaaaggctgctggaggagagaagcagccccacccctttaggaatagaatgtgggtgacccttgagggtgggtggaatttggatgggttgagagaaggaaggacggctccactgggggaagaagaagcaagtaagtaagggtgacaagcagacatgagcatgtcttttatcgtgtcttccttttctattttcacatcacaagcctagatctcatcaccaggggaaatgccaagaggctctggttgctcaatgagaccaaatgaagcttcagcccttccatgtgtctaccccattcctatctacctcatctgccccatgccccctcagatatgccaggtgggacttttaggcagtcaagttacctgagtacaagggtgagagatacctcacaggacctccccgcctacttccacccccctgatttgacttcagttcactgctgatctttacgaagtatgggatactgtgaggggacagggaagaatgaaggggcaaggggtgggaagagacatgtaaatgcaaacgtgaactcaaagcagagcaggccaggcaagcagagtgctctgggcatgcccgggaaggggcagggaatggggatctgcccatggagaggagataaattgcctcttggctgagtggacagcaagctcagaggacacaggcttacaccagcactggtcagaagtggtctaggggccaccctggccaacatggtgaaaccccgtctctactgaaaatacaaaaattagccaggtgtgggcacactcctgcaatcccagctactcaggaggctgaggcaggagaatcgcttgaacccaggaggcggaggttgcagtgagctgagattgcaccactgcattccagcctgggtgacagagggagactctgtctaaaaaaaaaaaaaaaaagaaagaaaacaaaaacgtggtcaagggtgcaggtgtggggttggttggagtgctggagagctaacactgccaggtttttatgatccccagaacttattcctagaaacctctattgtaactaaagttccttgagttctaagacaatataggaaagaataaaatcagtctagctttcataatcttgagatattgtatttatatgtgatgtcattatcttgaaaaggtctacaggccagctcaatgttagtgtttcattaaaatgtgtttaaatcaaaaattattcttccagtgcaacattttatcattttatctccttcatctcccatcaccaaacagctcatatcctatggcagcctgtagggatattagccaaagagatacacagtcagggtgacgtttgtccaagtgtgaagatgtttatccttggagttctccttgtacgttccctctccctcaatgaggtctcaatgaagggcagatactacctgtccataatacaatagccaaaagaaagatcacaatgactagcatgtactgctaacttattctttgtcaggcaaggtgtattatccaacatccaacaatcttagaacgtagaaactcattcacattttatgaggctcactgaggtggcataagccacctccatgcacacatataaaggggtggggctgtgaatcagtctgggcctgactgatttctcagctaaatccagagactccagatgtcctggaaccaaggacagcatgcggttactctcccttgtgcagaatcaatagacccaacacatattaaaatgcataaaatttaactagaagaaaaaggcaagcatttgagaacaatggagaatgcaggttacagcaccagctgcctctctttagttgatggagaagtactatataggtccttgctaccagaggttcttgaaccagcagcatcagcatcacatgggcgtttgttaggaatgctagttcccaggccccacccagactccctgaatcagaagacacattttaacaagatccctgggtgttttgtatgctcattaaagtttgagacttgctggtattgagagggctgtagcattttaaaagaaaaagaaggtcaatacatttgcctcccgacctccactgcttagtctgagagtgagaatagcttccctaattcttaataaagatctcaccagtagccttgaagtccaggcttaaaatattggattttatcttgtaagtattggccagctattattgccttggagaaagtcatatagcttaagttgttctgcaactactttttagaattcaagagacacacagatggcttcctgggccaagtttaacacagtagcagaagtatacatggtgctgtattgagcacatgcccctcaaaggcattctcaatgtgtttccttaaaagactggttgaacatgtaagtttgtacttccagtgcagcaataggttatgtatttcaaatttgccaatcaagtaaacgtgaattggtcagatcttagcggatttcaatttttgagcataggccagtaagtcctcagtttcaggaacttgttccagtcgaggacacatcaccccctccgtgtcttacctagctatgaatctacagcctgcatcatgctctgccaaccacaacgatgccagtggggttgccacttgtggattccaccccacttctatccattcctaaagaggagagggaggagagggatgagggagaaccatccctttgccctgattcttccgtggggctgcttattagacaatctaagagtttagagagcttgcttccccccaaccctcacctccctgcctttgtcacctccttctgccatgccgcctcctcctctgacttggataggttgtggctattatttttacctgcccactagaattcagctgttgggcccagaaaggtacacaggctttgcagaaggcagaagcgccagtaagcatttgcttatatgtgcctgtgggtgcacctaagcctctgtgactcagcccctcggtgcattcaggtgtgtttctatgctgggattttggttgaatgttgccccagacagaggagcccagagatgcatgtttctggcccacactcaaggaggccaggttttagctggggcagcttcctctggccaggttttaaaccttgtctagaaggggcaataatggaattgctgacgcaccactcttttaggaagggccagattggtgtgcagggcctggggcagagcaggtgttcccatcctcttgcccaggtaatatgagccacttattaaggcagaagagatttttgcctttctcatcctggtctgaatctcagagtgcaaacagtatcgtattcctcttcattcatcttctacatgtcatgttgaatatttaacgtttaatgcactacacaaagcatatcatatcatttttaaagcaaccataagaggtggagttatttatcaattgcatttaaagatgaagaaactgaaacacagagaggtaatgagtgactgacccacttagaacagtttatgacacgcaagtgtaaactaagtattatcactcgatggggtgtgggggtcctcagggaagtgcctgcagtgctctctgccctctggtttcttccttacgatggagtatggtagaccctcccttacagggtcctgagaggcctcagtgagaactcagtgaaaggggcatagcacagtgcctgacccaaaggaaggaccaaactgaatgtcagtttcatgtaggaagtggcagatccaagccaaaagctggatgagtccaaccctgtgttcctcaccctggctctggaacacaagactcgccccaccatgaatggaacaaaggccatgggccaccagggaaacctgctgtggagccaggctttgcagatcccaaaggaacttgggtagatagaagagatggggagaggccacctgctgaggggggctggagagtgactgcctgcaagctggctttgccttgaggaacggccttgcctctgcctatgttccagctgcgagtgtgtccctggctacagcgggaagctctgtgagacagacaatgatgactgtgtggcccacaagtgccgccacggggcccagtgcgtggacacaatcaatggctacacatgcacctgcccccagggcttcaggtaaggcaggagggcacctcaggaaggagacagcctgggccaggtggcaggggctggggctgactggctaaggtggccagaatggagactcaggcccaggtggctgtagccccggttctgggtgatgcctttattcccctgatacctttgcagtccttacatgtccccatgagggaaatagagcaggtattggtaatcccacattgtagatgggagaagagctacttgtggcaactccacgtgaaagctgggcttaggttcagcttgtgtaatgtcatgcttgggtaggattccatctaatggaagatgccaccatcttgaagcccagcttgcaaggtggaggtagccacatggccacactggccagaatcttctttctaggatgaagaacaaacatgatggttcctcagtggtaacctctattctacttctgttgctatgaatttggctactctagatgctttatataaatggacacatacagcatttgtcctttgttgggcttatttcacttagtatatagtgttctcaagattcaaccatgctgttgggtatgtcagaattccctttgtttttactgctgaacaatgttccattggatggatgcgccacattttgtttatccattcatctttccatgggtaggaatgtgctcttttaagaaatcacccccaggcaattctgatgacactgaagtttagggacctctactctagtccaactccatgattttatttcttggagccggagtcttgctctgttccgcagcctgaactcgcactcctgtgcacaagcgatcctcccctgtaactgggactacaggctcatgccaccatggctaccccaactctcttaaaaatgggaaatatgggacttagagaaggaaaaggtcttgccccggttagtggcagggctggaactagcccctagaactagtgtcatttcccatctcactctacctctctgctcgaggttctttggcctgagtaactgtgattgtctcctcttggccattctcctatctccctccccattctctcctgccttccagtggacccttctgtgaacaccccccacccatggtcctactgcagaccagcccatgcgaccagtacgagtgccagaacggggcccagtgcatcgtggtgcagcaggagcccacctgccgctgcccaccaggcttcgccggccccagatgcgagaagctcatcactgtcaacttcgtgggcaaagactcctacgtggaactggcctccgccaaggtccgaccccaggccaacatctccctgcaggtgtgtcccgccctgccctgcccttggaaggacctcaacatgcccacaagctctgatagttcagaaaattgctggaatgccccatcttaacagtaaagcaccatcagggacaacactcagcttgaggacatctggaccaactcatccagagagttctatagataactcctgaccagctctcgctgcaaactgcagcccccacttccagcctcattcactcattcctccagaaaatatgcattcaactattgtacaccagacactgtgctgcagaattgggattcagttcaagacagacaaaaccccttgtctgaggcctatccactaatccaagaatctcattctgggtggctggctgtgagtgcaacttctgaaaccagcaactttcaaccttggcaatactttagaatcacctcgagaactttttaaattatctttggccaggtgtggtggctcatgcctataatcccaacacttagggaggctgaggtgggtggatcacttgaggtcaggagttcaagaccaacctggccaacatggtgaaacccagtctctactaaaaataaaaaattagcagggcgtggtggtgcatgcctgtaatcccagctattgggaggcggaggcatgagaatcgcttgaacctgggaggcagaggttgcagtaagccgaggtcatgccactgcactccagcctgggcaacagggcaggactctgtctcaaaagaataaataaataaataataaaattatctttgcctgggccccacccgcaagagattcatgtgtagctagtctggggtaaagtctagacactggaattttttttttaattccccagatgactcttagcatagtgcctggttcctagcaaacattgaattaattatcattgttagcattttctttataactcttattagccaggtgcagtggctcacgcctgtaagcccagcgctttgggaggccaaggtgggtgaatcattttaggtcgggagttcaaaaccagcctggttaacatggtgaaatcccgtctctactaaaaatacaaaaattagcagggtgtggtggtaagcacccgtagtcccagctactcaggaggctgaggcaccagaaacgcttgaacccaggaagtggaggctgcggtgagccaagactgtgccactgcactccagcctgggccaagattctgcctaaaaataaataaataaataaataagacttattattcttctttatacagagaaaccaaagaagggcctgaacttgggcgggatcatgttatgcaccagagggagagggcagattagagttcgggcctcctgacatacattaatatatgaacatagtggtgcacagtaggcactcagtaaaaatgtgttgaactggtttgctcagtcagcacttgctgaggtgtaagtctaggccttaccttctggggatttactgactagatggaggaggaaagatggacatgaatttagacgcagcacagattcagaagctgctgcctggaagagggctctgtgagatgggcagggaaggttcagtctcaggtaagcccttactaacacgccccggctgctttctccaggtggccactgacaaggacaacggcatccttctctacaaaggagacaatgaccccctggcactggagctgtaccagggccacgtgcggctggtctatgacagcctgagttcccctccaaccacagtgtacaggtaagggcctctctccctcctgacccactgtgtgttcctccgcatccttctgcctctgggcctgcaactcagaagggggattcaggagaactcgggtgtcccttctccccgcccctaccacgcacatgtgcgcacacacacacttcctcctcaccgagtggtgagtgggagggagaaaggcgtgtcagaggaagaggcagaggaaggcaggcccgcagaggggaggtgacacctcatcaccataagataaacaggcagctggctactgtgcgggagtgcgcgctgcagtggggacgaggctgcttaatgaggtgcccttttcaaaatgtcatcttaatcttttattagtttaagaaagacaacagggcacaattagcatgcaactcaaggggaagaaactcaagggcacggagggagcagggccaccccttaggtgactttcaaaccatcctgaagggcagcttttcctaaacttcagcctctccagcagccaccctggcttgtgtgtgatgggtgtggcagctggactttcacttcagatgctgccttacagcaactttcaactgctcactttcttttcttttttttttttttttgagatggagttttgttctcttgcccaggctggagtgcaatggagcaatctcggctcactgcaacctctgtctcccagattcaagcaattctcccgcctcagcctccctagtaactaggattaattacaggttcatgccaccatgcctggctaatttttgtatttttagtagagatgggatttcaccatgttggccaggctgctctcgaactcctgacctcaggtgttccacccacctcagcctcccaaagtgctgggattacaggtgtgagccacagcacccagccaaccgctcactttttgcatatagctgctccttaaggaatgaacatctggggaatcacagatatgttagttggatatgttagatttttttcagcttctcagtaaaataaatgctaaatattaaaataaaaatttagttataaatatttttataatagtaataaaaatgactactaaaagttaaaaatgtctgtgttacacctaaaatcatgtcaaactaccagtagaaggagagccaaaccttagggaaaccacagtacaaaagagaggccacactgtcccctcagaggcaagagcacatttcatagggattggtgaagagctgcaactttcagactttcttccccctgctaactaaatcttttcttccattaaaatcttatattaaacttaagaattgtaaatacttagaagcaaaaccgccctgcagtgttgaagcaaagatcccccctccacacacactgttgtcaaggcccctgataaatcatccaacaaacccaatttgaaagccattggttaaaaccagtggttctcaaagcgtggtccccaaggcagcagcaccagcatcacctacagacatgatagaaatacacattttcagactctaccccagaactactgaatccaaaaccctaggggttggccccaacacacctgtgcttcagagatccttccaggtaattctaatgcacaagtctaggaaacaccagtttccaaaggaaaacttcctgcagaaagagcagtctgagttgggccttgaagaaagggaagaacttgtgagagcagagagaacaggtgggcaaggcatgctgggaggtcagcaaagacagatgaggagcaaagaaaagggtgttgaccagagcaagaggctcccagtggaaggtggataaagaccaggcaggttaggacagttgggcacagtggacaccagaagaaagagctcaccctggtggtctccctagagcctgggccgcctaacatctgtgtccctggagccacaggtcctggccaagtggagaggacagagagccaaggaggcagggccagggcagcctgtgaagcatttgctatcacataaatccagatgtgaacaagtgattcagcctctttgtgcctcagtttttccccctcccccttcccatgtaatgtgagcaatagcaggatgtacctcttagggcagtcactgagggttgaaataacactggaggaagtgcttggcagattaagcctttacgcagacatgtcaaggacagaaggtgaaagccaggcttccagaagcagctgagccctgccctgagctgggggccttcccaaacagagcccagcctttgccctctgctgacgttagctgtcagggctggtgatttggtagaaggctggtgtgggtggtaggagtgtcgcagcactgtgctgagttatgaaatggaaagtcagagaattgctgtccagaagctgctgtcagggagccctgagtttgagcaggtaggtggccctggagagacaccaggctctgtcttagccacagggaaaccaagctaaggatgccctggcactcctggcctagatcttcatgctgagcctgtaacagatctttagtacccttcattcagtttccaatcctcaggggcccaaggctctagcaattccagattaaaatgattttgcttccaaacacttttccctgaggcagccctgtttctgttgccattagtacactctcactcattccacatctaccaggccccatgtttgggccagaccctgggctaggtgcaggggccacagagctaaacaaacacagtccagggaggaagacacacatatcaacaagcagtggttccacagcaaaatcaaatcattctcactggagacactggtgtcatgctacaggaacaccaatgatgaagcaaagtttttttgttttttgggttttcttggagacagtgtctcactgtgtcacccaggttggagtgctgtggcatgatcacagctccctgcaacctccacctcccagcctcaagtgatcctcctacctcagcctcctgagtagctgggactgcaggtgtgcatcacaacgtctaatttttgtttttttctggaagagacagggtttcatcatgttgctcaggctggtcttgaactcctgggctgaagcagtctgcccaccttggcctcgcaaagtgctgggattacaggtgtgagccactgtgcccaccaggagcaaatatttttgcttggaggaccttggaggaggaggtggtgtttgagctgagacatgacctgtgcctcagaatcattttctcaggctgagcagcgaggaagccctggggaggaggaggccccatcagcctgcatggaagccatgtgggagggctggggttaatggagggcacagcctgagctgaccagcagccgagggggccaggaggccagtccaaccacaaaaaatgagatctcctcctcagcatcagtacaataacctctagccacccaggaaggccaccttggcctcagggccagagtcagggagcccagccaaagctattctaactgggggagttggcagccaccagcttttggctcactaaggcccactgaccagcttcagagtgaggatgtcagcctgggttcccagcagggacctgcaggctagattccatggtctccattctgtccatgcctgatgttgttcatctgcacagccataatcacaaatggtgatgagggcacatgaagattctattccaggccccagggcaaatacacagagaagcccacctgagcccctccttgccccagaatggggacagacttcactgttccttggcactgagacttgtgagaaggccagactcacatgccagcaaggccaaatggccacataggtaacagacatggggaaaatgggctggagtccccatagggagtggtgggggctacagtagcctaaagggtggagccccatccaaaggagtggctgacctcagctccagcagacactgccatgtgggaatatagattatcaagagaagcgggaccaccggggtttctatgtgagatatctaagtttttgagtgttggccattttaaaacaccgcgtgggtgtgctctttgaatgcaatgcagtgcatgctctctgagtcttgatttctacaatcctgtccactgccaaggtctttgtctcattggatcctcactcctgttttagggatgagaagcctcatattagaagcccagtaagtggcagagctaggatttaaatccgggtcagttttccacccaaaccagctctcccaccgtgctggctccgggacatgaaagacagagccgagagagtgtgggctgtgctacaggagtagggggttgctgcagtggggcctgaggtctccgcttgctgcctacccgaaatcccaggaactttttgttactgcgaggctctatcgccacctagtggtcacgactcagcattcaggttagagcaaccagcacctagaggaataacaaacccttcctccctcaagtcccttaagacttcaggctgaacacctaaagtctctgacccttaagtcttttatttgaaaaatggaggaaaaagtgtgcctccttcctgggggttgttaggattaaataagagaatgcaagttaactgcttagcatagggtagcacaatgcctggcctctactaagggattaacacgtatccaccattattattaaaagcaaaagaaagccaggcatggtggctcacgcctgtaactccagcattcttggaagccaaggcaggaggatcgcctgagcccaggagtttgagagtatcctgggcaacatattcagactccatctatgcaaaaaataaaaaattacccaagcatagtagtgcacatgtatggtcctagctacttgagaggctgaggcaggaggatcacttgaaccctggaggtcaaggctgcagtgagctgtgattgcaccaccgcactgcagcctgggtgagagagcaagacccgatctcaaaaaataaataaatgcaaaggcaaaaaggccatgggccactctggccaatgcctgtggttatgccagttccaggcaggatgcgtccagccccaccctgacaactccagagctctccacctcccacttggcaccagttcagtctggcccagtagataatgaggaagaccctcagagcccccttctctcccctgaaatccttaaatatctctccaggagactaatcattggggcttgggaccactatatcatcatttcttttagtgtgaaccttaggttgttactattttttccttttttttcctctacttttgtcacagtagagccattttcccattattttgtttcaaaggctaagatttaataatgatttttgtttgtttgtttgtttttttgagacagagtctcactctgtcacccgggctggagtgcagtagcgcgatcttggctcactgcaacctccacctcctgggttcaggtgattctcctgcctcagcctcccgagtagctgagactacaggcacccgccaccacgcccggctaattttttgtatttttagtagagatggggtttcactatgttggccaggctggtctcgaactcctgaccttgtgatccgcccgcctcggcctcccaaattcccaacagggatttgtcagggagaattcaaggatgtaatcccaaagtgctaggattacaggtgtgagccaccgtgcccggccatgattttatttttttattttttaaggcaagtagaaatggaggcatcctgacttagggatgctggtaaaaagccagagcctttagcactgcctaccctgaacctccagggatccacagtttgaaaaacactggcttcagccattatatccaggagatctggttaaaagttgccaggaagaggcgacctgttaacccatgagcacctaccggcatagataacattatgggaggtttggatttggaagcaatcctgactttgaacctgagttccagcacttcttagcagtgtggcccctatcgggttacttagcttccttccctaaaatgggactcacaagagtcccctcctcagaaatgggaatgagccagtgggagtatacagagccctgagtggctcaaagccactcaaagccctgggtggctgtaagtttgccaaatccataggcaggttcttccagggcccactaacctactcccccaccccagttgctgccacacccagctccagcaagcccagagtaaggtcaaggagtcatcatttccacctttcactgagcacttgctaggtgtcacaggccacgtattgcccattaaaaccagtgtagggccaggcacgctggctcacgcctataatcccaacactttgggaggtcaagggaggaggatcacttgaggtcaggagttcaagaacagcctggccaacatggcaaaaccccatctctactaaaaatataaaaattagccggggatggtggtgggtgcctgtaatcccagctacttgggaagctgaggcaggaaaattgcttgaaccagggaggtggaggttgcagtgagctgagatcacgccaatgtattccagcctgggcaacagagcgagactccatctcaaaaaacaaaaacaaaacaaaaaacagtgtaggccgggtgcagtgacctgtaaccccagcactttgggaggccaaggtgggaggatggcttgagcccaggagttcaaggctgcagtgagcgatgattgcaccactacattccatcctgggcaacagagcaagacccctgtctcttactaaaaacaaccaaaaaaccaatgttgtaagatgagtataaaactcattgaatagaagcagaaacaggggcttacagaagtgatatgacttgcccagggtccctcagctggcaggcccagtgtgatcccagatctctctcctcaaagcatgacctggctgaaggctatacctcgagcctacctaggattctcccatgtgggcatcagatgaggccctccaggaagcccagcactggggcactgcagaacccagcactttgtctagggcaagagccagtgaccacacagccctctctgatctgtggcttctgccagaccactgtctccaggctgggtacccctgcaggctattcaccagcacctgggatggcaggaagggaagaaggagttgggcctggagccagctgccaggcaggagtaggtggtatgtgttcgctgtgtctgtgtgtgtgtgtctgtaatgggaaaacagctgccctgactccctgaatcataatgttggaagcgagtgcctgagctgcagtctcttgacaactccctttctgacaggtggctgtccagcatgttgacacacctccagggtggtgagctcatttgcatccaaacagcatccatttctaggacgctgtgggatatacctgcatatttttgcatgtgtggttagaaaactgtctgagggctcaaggtcacaagtttatggtctctgcacggggccatccctccccttcctgcttttaccagcccatctgtaggatcagaggcctctgccttgccctcagcttgcaacttggtgcagctggaggcttctgaaatagaaatagctctaccttcatagggctttttggctccccatcaaaaaaccagattcctcagtggactcttttacccaccactccacctcccactaccctatctcttggctagaccttacattgataagttgtcatttactttataggaaaggctaaggaaagtggaatggaagctttgtgagtgcagttaccctatcttccctgtttgtcactgatccacagcacccaggacgaggtggcccatagcagacacttggtgggtgggcggatgaagggtagatgaaggatggatggatggatggatggatggatggaagagagtagataaataagtaggtgggtaggtagagagatggataggtagatggatgcagaggagggtgggtgggtagatgaaggatggatggatgtgatgggatgaatggatgaagagggtagataaataagtaggtgggtgggtggagagatggataggtggatggatggagaggagggtggatggatgaataggtagaatagatggaaaggaagtatagatggttgaatggatggttggatagttggatgaatgagtgggaggagagatttcccaatggatttgagtgggtcctgggctcctgcatgtcctctgccatcactttctcccagggatcagcactagaacagggatcactagctttgcaggcaatggtccttgttagtcttctaacactaaaataactgctcacattttcccagtaattgacaaagcgctcttttgttgttgttgttttttaagaaataggggtcgtgctatgtttcccaggctgaacttgaacacctgggctcaagtggtcttcctgcctcaacctcccagcttgtcaagtaactagtgatacaggcacatgccagcatgcctggttacaaagcactttcacgtaccctctcttattttatttgaacatcacaatagttctgtgaggttattatcccccttttacagatgaggaaactgagaccggatgttctattcctatggttggttatggttccatccagcagtaaggggctagaatggactctgttttcttcagtataccccaatttagcctgtcttctcccaagcatttctcttgcctttttggctgctgagatttctaaatctgagttagtcactgaaatggtccctgcctgcctaatcagtgccaccccctgctgggatcctcttgttggagccaacaaggatttgtcagggagaattcaaggagagaggaagcctccatatgtatccctgatacctgaatagataagacagagctcagtctactcctcagagagcttcagggaaggaagaggtgtcacattccccaactcccatcatctcccaccactgttccctcccagcccccgccgagggtggagcgctggaaagagcacaatttgggagtcaaaagtgttgcctacaaattctgtctcttgcctgtactagctgggtgacctcaggtaaatcacttaacctctctgggcctcggtgtcttcatctgtgaaataggatatctggcacccacttcatagaattattgtaaggttcaaataagtgaaccacttagcaccatgtctggctcatctgggccctcggtgagtggctcttggccctgttagagacagcatgggcaagtaggatgtgcacactgaatatcccataaccagccaggcacggtggttcatgcctgtaatcccagcagtttgggaggccgaggcaagtggatcacgtgaggtcaggagttcaagaccagcctggccaacatggtgaaaaccccatctctactaaaaacataaaattagctgtttgtggtggcatgagcctgtaatcccagctacttaggaggccgaggcaggagaattgcttgaacccagcaggcagaggttgcagtgagccaagatcatgctactgcactccagcctgggcgacagagtgagactccatctcaaaaaaaaaaaaaaaaaaaagtgaatatcccataaccaaaacatttgggacccaaagtgttgaatacttgcattatgctggttcagcatctctaatccgaaaatctgaaatccaaaatcttctaatgagcatttccttcaagcatcatgtgggtactcaaaaagtgtgggcttttggagcttttcagattagggacattcgacctgaacctcagttcaaatccttgctctatgtcttaccaactgtggtgccttaggtaaattccttagcctccctgagctaccgtttcctcatttctgtagtggagataacaaacttacctagcatgagtattataaggcagtatttccccaaaagtggcatgcataccactggtggtacctgaggtgaccttaggggggacaatagcaaactattgaaattttaactgtgagagagtttgttttatatgtactagaaaaaaatataaaaaccacatcaaaactattttttagaacaatgctaacctttatccttgctgatatttaagggggaaattgggcaattgaaaagaacaagcgtgttgagtaaatagtggtccaggcagcatgcagatagagcaggattgagaaggtggtctgggaatggagtttgcttaactctatgaaataatagaaaagaatacaaataatgatagccaaatgcaatacctgaccctagactaaatcttggactggaaggaaataaatgctgtaaaggacagtattgggtccaatgcagaactggaatacagataatagactagataacagtgtggtatccatgttaaattcaccaaagttgacaactgcactgtgcttatataagagaatatctctgtccttaggaaatgcacactgaggtatctaaggataaagggctgtaatgtatgtaacttacctttaaatggttcagaaatgtgtgtgtgtatacataaaatgcacagagaaaaccataagcacattggagtaatgggagaaactgggtaataagcatcttctgtactgtttttatttttgcaacttatgtaagtttaaagttatttccaaataaaaagtaaaacaaaatgtaagcaatgcaggtcaagtccacagcacagggcccagccatggaaggcccttagtgaactctccggctttctccccttctctactggccagtgtggagacagtgaatgatgggcagtttcacagtgtggagctggtgacgctaaaccagaccctgaacctagtagtggacaaaggaactccaaagagcctggggaagctccagaagcagccagcagtgggcatcaacagccccctctaccttggaggtaatgccctctttccctaccacctctacctccctctggccctctgtgctccagtacagaaacccaggccactgccaaagccaatcagggaaggcttcctggaggaagggacaacgaagctgatctctaaaaggtgaataagcactagccaggccatggaggaaagagaatgtgggacaggtgcttggaaaggaaagagaacaggactcctggaaactacacgttgtgacgggcaagggtgagaagggggaggcaggagatggaagcagggtctaggctctgctgaagtctgccagcttcaggtcatattccctctgctctgccacctcctcaaaccctcggaggttcaattaatgaatgtagaagaatttgagattaaaatcaaaggccaaaaatggaagtaggccaggtgcagtggctcacacctgtaatcccaacactttgggaggctgaggtgggaggatcacttgagcccaggagttggaggccagcctaggcaacacagtgagacctcatctctacaaaatatttaaattagctgggcacagtagtgagcacctgtagtcccagctactttggagggtgaggcagggggattgcttgagcctgggaggttggggctgcagtgagccatgattgtgccactgccctgcaacctgggtgacagagtgagaccttgtctttaaaacaacaacaaaacacaaaaaagtagccatcagttaggcagactctgggcctgaaatgcagcccctgcactgatagttctcaaggggttaagtgtaaaaaaagctaccaaaactgctcgttcaatcctaagattcccaagactttacccagagtccacctgcagagactagcacgggcccagaagagggtgttgttaatgggtggttcagatgtagggaggccagggaaagctctgtgccgagggcagccccagaagggacaccacttatccctggaggaggaccgtgccctgtgccccacctgctccaggtgcacccagaacggaactgggtgccctgcttccaggccagtcccaggctctcaactatagaaggtgggcagggaatggtgtagaaggggagcgaaaatacaaattattgaaaagcaaattaggtctttactaacagtctcttgaagatcctgagaagaggggtacaccgcacataaggcagcaaactggtctaaaaaccctgaaccccaaagtttcgttgatcaagcagctccccaaaaccttatcttatctcctcagctgtagctcacctgccctggattctcttgtgaggcctggatcaaagggctgaggagcctggtggggacagcaggttatttggtgcacttgcctattggggggaacggtctcctcagttcagccagtgggatcatagggcaatgggtgaccagatcatctcattttttctagggaagtccaagatacaaatttttatgggaaattttctaatattacatattggcaacaaattcacgtttttttaaggagtcccagtgcaggaccaaggatgcacgtccctgtatggaggaggtccgaggttttggcccgttaacctcgtttgaacagcagaggcccagagttctggccatgaatgtgtgaaaagtgctttttcgctctgaggacagcagggtggcaggggagggtcttcaggccactgtcctggctcccctcccacaggcatccccacctccaccggcctctctgccttgcgccagggcacggaccggcctctaggcggcttccacggatgcatccatgaggtgcgcatcaacaacgagctgcaggacttcaaggccctcccaccacagtccctgggggtgtcaccaggctgcaagtcctgcaccgtgtgcaagcacggcctgtgccgctccgtggagaaggacagcgtggtgtgcgagtgccgcccaggctggaccggcccactctgcgatcaggaggcccgggacccctgcctcggccacaggtcagtgtcccaggagccctggctgtgtgctcgagctcccagaatggcctcagtccctaccccacctgagaaataggcactactggaggctggaggagttgcagtcagaccgcagataggatctgtgtaagtgtaactgcttaagaggtcaagaggctgagcttacacatctgagcagccagacctgcttggagggatcagcataagagggccctgctcaaaacactagtctctgccaggtggcctttagaacctgtccagagccacagtgagcccccactgtctctgtgggaattaaaaaaggcacccacatgggcagactcagcctgtgcaaggcaccaggtgtatataaccacacatcaaaccacatttaatagtttaagcaactactcattcaacaaagatttactgaggtcctactacgtgccaggcctcatgctaaatataggagatccagtactgtcagtgttaagaaacctgaatcagccaaaactaacaccagagccaacactggaaatgtggttggctaaaccagtcaggaaatgattttttggatcaggaataagggacagctatacagggtttgagcttcttgtgttgctcttgagcatatgtgtgtgtgtgtttgactctataatacggatcctggctctgcatgtcatctcaataggggcagtggtgcatcatgattcagaatataggctttaccttcatttttttccatgggtgaaatgtactgcataggagcagcagacaagaggttatgatggaaattcagagcaatactgggtgtaaagcacttaacacaattcctggtacatagccagtggtacctgctggtagtagtggggtggtagtaattcttatttaagatggtaaagcaattaaaatgtttagagaatggctagattctttcaagcagttgtttgctacttggctgcatgaggtgtgtgtgtaaatcagcaagccagcctctgctgtggtcacagctcacagtggacactgggtgacactcgcaggcttctggctggttggccaggggaaccaaggtggttaagaaaagagatgctcagcctaggaaacagagaaagctattggactgtactcagctccgggtcccctggtccctggctgggtggacagagggagtccccagcagcaccaactctgatccagttcccttctcatcctcctctctgcccctagatgccaccatggaaaatgtgtggcaactgggacctcatacatgtgcaagtgtgccgagggctatggaggggacttgtgtgacaacaagaatgactctgccaatgcctgctcagccttcaagtgtcaccatgggcagtgccacatctcagaccaaggggagccctactgcctgtgccagcccggctttagcggcgagcactgccaacaaggtgggtctactgtgcctgtgggagggaggaagtgggggtcagagttggacttcacatccagatcacctcagttccagttctggctgtgccacttaaaggctgcatgaccttggttcagtcactttctgagcctcaattccctcaacttgaaaacggaggcaatactataccttcctgtatcagttatctagtgctgcataacaacttagccccaaaccatagcagttcaaaaccacaaaaaacattttttttagcctacattgttcctgtgggttgggaattcagaaagagcgtagctgggatctctcagggttgcattctacacagccatggctgcagttctctgtaggctaacccaaggcagcaggatatgcttccaatgtgctgcactcccatggcgctgggtgttggcgggaggtcccagttctgccctgcatgagtcactacacaggctctttgagggtccttgcgccagggcagctggcatgtcccagagtgaatggtccagaagagagtaagccacttgtcttgtatgacctacaattggaagtcactcacaccatcatttccaccacattgcattggttacatcagtcaggtacattcagtgagggaggggaccacataaagggcatcaataccagaaggtggtagtcactgggggcaatcttggaggctagctactgtgcttctttatagggttgttgggaggagtacgtgagatgttgagatgtaaagtcagaagcaacattgtcacgatgaaggccaaactgtcatttagaatctgcatgaccttgactatcctggccaacatggtgaaaccctgtctctactaaaaatacaaaaattagctgggcatcatggcggtcgcctgtaatcccagctatgctggaggcgaggcaagagaatcatttgaacccaggaggcggaggttacagtcagccaagatcaacctgggtgacagagtgagagcctgtctcaactctgcatgacattgagcagcatacttgtggttcacttcctcatctagatagggccaggagtggtggctcacacctggaatcctagcattttgggaggccgaggtgcaaggattgcatgagctcaggagcttgaagctgcaatgaatgcaccactgcactccagcccaggtgacagagacagaccctgtctccaagaaaagacaaaagtgcagataactcatactgccaaagttaagattctaaagcatggactttttaaagatgaaacaagtgtagaaaatggtcctcagtggacctctgcagggagaacacatgagcagtctggatggttcttttctcctcttttccagctgttggcccttgagatgccatgccttcaaaactaatgaaaccctagccactcagagtggccccctgacattgaccagcaccactgacatcacctgggagtcacctggggctcccaggccccaccccagcccttttgagtcagaacctgcattttgcaatgattcgcatatgtatccaagctgatggcattgctccacagcctccatccaaccctcttgcccttactgggtcagcagaagccagttctttggtctgacctaaacaaaggaaattatattaatattaaaatggttgtcttaccttgggggatctttctcctgcatggacactgagaagtcttgctccctgccaccaggatcccaggcagtccaccccgtgccttgaggacttttccacattttatacctacacgaaatactattcttaaccaaaactcatttttaaaatgttattaaatagcttattctgaaataatttcagacttacagaaaaactgtcaggacagtataaacagcttaatcccttcaccccagtcattagcatgttgccccatctgcactccctgtctctccccatgttatacacatgcacatgcacacattgtcattaacctctttctaatccttttaacaatctcataattttaaagacttttaacaacacctgaagctttaaaatgcataaagccctttctccttcacaatcgcctctggtgcccgtaacagcctgggagttgctggaaggacaggtaaatgtgttaccactttgcagacacggaaactgtgacttgcttgtcaagggtcaagggtcatggctcccttcctcaagtgccttgctgcagacattctcccactgtagtgaggacagtagaggggtggaaatgaaaagctgggtcagggtccagagtgtttaagcagatacaggggtgccctttcccagcctgcagttatttctaggccttctggaaaagctcatcgcaacacctgcttcttattcagatatcaactccagctcatttcccagagaagcctccctggcccctgggccaggtcaaatgccttttgaatacaaatgtcttatagcatacaaaaacatatactgtatgttcttgtatgaacatcttccctttctttatagcatctacctcagtttctttattaaatatattcacttaaatagtatctagactctaggccaagagagacagactattgggagtggtagtgactggggcaaactggagattgcctgccccatctaaagcactcagcttcagccatcactgcagtgcagggttgcaggctcagctctgccagacctccttgttttcaaggaaggcagaaatccagattttcaggtgaaatctcctgctttttgaatgttgacatttaattaatttttaggcacatgtagggtgatccaaattggtctggggtcaggatttggcccacagtctatcagtttgcgtcatctagttttagttttgactttaggtttcttgaaggaagggaccaagcctgcttttgtcatcattatatcctcacggcttaggtgtaagcctgtcagagagcctggtacaggaaaggcacctgtttgtaaaatagatgggtggatggaggggagggtaggcagatggatgagtgaataaattcttacagtcttcagagcacaagtatttcaaagcagcctacctgggaactgctcatggtcctgctggccacctagaccaccaatgccctgacttctatgccctctgcagagaatccgtgcctgggacaagtagtccgagaggtgatccgccgccagaaaggttatgcatcatgtgccacagcctccaaggtgcccatcatggaatgtcgtgggggctgtgggccccagtgctgccagcccacccgcagcaagcggcggaaatacgtcttccagtgcacggacggctcctcgtttgtagaagaggtggagagacacttagagtgcggctgcctcgcgtgttcctaagcccctgcccgcctgcctgccacctctcggactccagcttgatggagttgggacagccatgtgggaccccctggtgattcagcatgaaggaaatgaagctggagaggaaggtaaagaagaagagaatattaagtatattgtaaaataaacaaaaaatagaacttatttttattatggaaagtgactattttcatcttttattatataaatatattacaccatctgcgtatatgtaccatatagtgagttatttttaccaagttttgtgttgtgtatttgt

SEQ ID NO: 2 - DNA, 173 bp, homo sapiens
tcctcagaacaggtgcaacacagtgtgttttgctggggaaaagggatgtcaagcaatctatgacgggggtgcagggagtctggggagaaacacaaggaagtgtgtgtgtgtgtgtgtgtgtgtgtgtgtgaatgtgtgtgtgtgtgagagagagagctggtgtttgtgttcca

SEQ ID NO: 3 - DNA, 333 bp, homo sapiens
  misc_feature 88, 164: n = A,T,C or G
ggaatgtgccaagacattctttagggttggtaaccagagacgctattttgtccttggtggctaagaaatcacttttctgactgaaggnccatttgacttacttcttttaaattcaggggaatgggtgggcatctccatgattcaggtaaggaaaaatccaaggnaaataaacacacacacacacacacacacacacacacacacacggagtagaaatttttagtgcaattttttgtctcacagcattaattaattgcagggatataactaccttggcagaattttttctccccaacccaccaccccccggaataagtttggctcttttcagct

SEQ ID NO: 4 - DNA, 166 bp, homo sapiens
tgcccactcataagatgctgaggttacaactgttaataagatattaagatactgtctttttcttcctctttctctcttacacacacacacacacacacacacacacactttttgggccaactggaaattcatacattctccccagcactggagctcaaagcgtctg

SEQ ID NO: 5 - DNA, 360 bp, homo sapiens
ttgttgttgttggtggtggtggggtgtgtgtgtgtgtgtgtgtgtgtgtgtgtgtgtgtgttcgagacagactctcactctgtcacccaggctggagtgcagtggcacgatctgggttcactgcaacctctacttcctcagctccaaggatcctctcacctccacctcccaagtagctgggactacaggtacgcgccaccatgtctggctaatttttttgtattggagagacagggttccaccatgttgcccgggctagtgttgcactcctgagctcaggtgatccacccacctcaacgtccccaagtgctgggattagaggcgtgagccaccacgtctggcctatacactatagagttt

SEQ ID NO: 6 - DNA, 212 bp, homo sapiens
tctggacaggaccaggagttggctgctgtcagcctttgccccacctctctgtggctactgggtatgtgaatctctcaaggcctgaagagaggacagctgaggaatttggaaatcctaaaacacatgcatacacacacacacacacacacacacacacacacacacacacttttctttcccttaaaaaaaaaaagattcattcaccgtgtgca

SEQ ID NO: 7 - DNA, 347 bp, homo sapiens
ctgtctacactacccacccattagtcacttattagccctctgaattactggattgaaaaaacatagtatatatatagggcttggtactattcacggtttcaggcatccactgaggggtgttgcaatgtatctcccacggataaggaaggactggtatattaacacttttatttgatttacaaaataaaggatagtttatatagttctgggtaaaattaattaattaatttaaaaggaaaaaagataaaggcaaactttaagcttgttaaaaattaagtaaaataatttggattatttaattggacaaagaggactggctttgccaatgaaacaatatggccgacatg

SEQ ID NO: 8 - DNA, 195 bp, homo sapiens
ggaccttctttctgccctaaaaccgcaatatcattataataacaaatatatatatatatatatatatattttttttttttaaaacaatcttgctatgttgcctaggctggtgtggaactcctggcctcaagtgatcctcccacctcggcctcccagagtgctgggattatagacatgaactaccatacccagcca

SEQ ID NO: 9 - DNA, 308 bp, homo sapiens
cacagccatcaagtttccaacttactgcctcacatattaagatgatttttttaaacaaacttaacaggcgatggatactccattctccatgatgtgcttaattcacatgcatgcttgtatcaaaacatctcacatactccataaagcctgtaatcccaacactttgggatgccaaggtgggtggatcacttgagcccaggagtttgagaacagcctggacaacatggcgaaaccccatttacacacacacacacacacacacacacacacaccacacaaacaaaatgaaacaaacacctaaccaacaa

SEQ ID NO: 10 - DNA, 305 bp, homo sapiens
tcctaacggctgctaccactaaagatcttagcatggtgtgtgtgtgcgtgtgtgtgtgtgtgtgtgtgtgtgtgtgtgtgtggtggggctattcagtaaggctagaagtgaaaaagctagtagaaagcccatggtgatggagaatggaggaagactgattagggagctcctcagcagtataaggaaggactaagagcacataaggacaggatcatagaattccgcatctcaggatttttgaggctgccactgccttagctgtgaggccagtgcatataagaatagtttgcacagttctgctgtgg

SEQ ID NO: 11 - DNA, 370 bp, homo sapiens
cctctgggattagcctctcagggtacagatataacgatgattgagttggcttatgtatgtgtgtgttgtgtgtgtgtctgtgtgtgtgtgtgagagagagagagagagagagagagagagtgacagagagagaatgagagagaactggaagttgtcaacaagaagagtcaaactctgtaaaatatttgaagagatttattctgagccaaataggagtgccacagccccgggagatcctaagaacatgtgcccagagtagtcaagctatagtttggttttatacattttagggagacataagacatcagtcaatacatgtaagatgcacattgatacactggtttagtagggaaaggtgggacaactcgaa

SEQ ID NO: 12 - DNA, 251 bp, homo sapiens
ggtgccaattaaatccaacaaggtagctgagtgtggtggtgcacgcctgtagtcctagctatgcaggaggctgaggtgggaggatcacttgagcctgggaggtcgaggctgctgtgagctgtgattgcaccgctgcattccagcctgggagacagagcaagatcctgacacacacacacacacacacacacacacacacacacacacacacattccaacaaggtaatgtgtaggaggaagtacccgagctt

SEQ ID NO: 13 - DNA, 335 bp, homo sapiens
caactcctgcagccctttacgccaagcacagaaatccaggaggcagagcctagcgcttgatgacatggtaattgggcctggaagtggggatttctgtcacttacctctccttgaaaaataatcactattgccaacgcctggttaattagcctgattcaattctcttcagcctcattttgctcaaatctaccagatttgtggtgctccttggtcctccaccacactttctacccctcatcccactttgtgtgtgtgtgtgtgtgtgtgtgtgtgtgtgtgtgtgtgtgtgtgtgtgtgtaggacatggccaggaatcctgactggcttcctttaaa

SEQ ID NO: 14 - DNA, 167 bp, homo sapiens
aagaccaccctcctgttgtgctctcctgaaatgtattcatatccacccatacacacacacacacacacacacacacacacacacacacacacacacacacacattctctctctctctctctttctctctctctcttaaatgtcagttttctcttcctgctttccaga

SEQ ID NO: 15 - DNA, 255 bp, homo sapiens
cttgacattcagggccttctgagtacatcatcttgtcaagaaacactgaactattcagtacacaacaggtcagaggtgcccatttgatagcctgaggatggaatccttattgcagcattttgcgtcatgccacatatatgtgttttttcaatcctcctctgttttaaaaattggaaaatttcatacaacacacacacacacacacacacacacacacacacacacacaccccccataccacaccacaccacatca

SEQ ID NO: 16 - DNA, 152 bp, homo sapiens
agcctctgactctcctctgtggggctaatccagaaaatcttactttagaaataacaataataataataataataataataatacctcattcatctttacttatcatgtgctagtatgtttctaagccttttggcatagccttcaatgtccct

SEQ ID NO: 17 - DNA, 230 bp, homo sapiens
ctcttcccatgtcctgcttctctccttcctgcgggttgggacccagtaccctccatctctctcactcctcccctctcaaacccttcttttaggaaaggagtccaaatcgaccacttacacctcagttcaatgcaagccagtataattaataaggaacatttaagggtgtgtaagggtgtgtgtgtgtgtatgtgtgtgtgtgtgtgtgtgtagctcactctgcctctgcc

SEQ ID NO: 18 - DNA, 360 bp, homo sapiens
  misc_feature 33, 36, 72, 281, 311: n = A,T,C or G
gatcaccagggaatctagatggaatccatagtnctnccctgcaagaatgctgcaattctgtaccgtggaggngccaacagaatcaccaggctctgtgactcagtcacaacaccctgacctgcccctgtccattctccatatcatacccagagtggtcttttcaaagcacagctttgaccaattctctgtctttcacacatacacacacacacacacacacacacacatgcgtgcatgcatgcctgaaatagtatagtattgctcttaagataaacattaangttcctaccatggtacagaaaatatatgtngttaggccccgtggctctttcttttccagactcctcttacccttttgtg

SEQ ID NO: 19 - DNA, 133 bp, homo sapiens
aaatcttccattgcagaccaattaaaatttaaagattttctctctctttccccctcttctctctctctctctctctctctctctcacacacacacacacacacacacacaactctccaagcacaaagagctga

SEQ ID NO: 20 - DNA, 245 bp, homo sapiens
tgagtggatgagggagaaggataaaagtcataaaatgcctcgcaaaaactttgaggtctgcctgcctggtattacagagaagcttgcacaatacagaatgttttgtgggaaggaaggcaggcaggcaggcaggcaggcaggcaggttggttatgttttcactcttgatatctcaaagctttatgacacactcatggagtgaacataatctttgtggcatgatacaaagggactgaatcactcaag

SEQ ID NO: 21 - DNA, 278 bp, homo sapiens
agctatgatcatgccactgcactccagcctggctgatagaatgagattctgactcagaaaaatataaacacacacacacacacacacacacacacacacacacacacacacacacaactttctgtctgcccccttgctcttcctgtcccatctctgcctttcttctttcctctctttgtcaaatctccttcgtctgcctcacaaaggccagtgagccccagccgcagaccagggaagccagcaaattaggaattttcttcacaaagttttgagtagct

SEQ ID NO: 22 - DNA, 184 bp, homo sapiens
tctcccatctcctccctagctatcccctgcctggtaatcactgttttgttctctatttctgtacagttgggtttttgtttgtttgtttgtttttagattccacatatacttgaaacaatgcaatctttttctttctttgtctggtttatttcacttaacacagtgcactccaggctcgtctatg

SEQ ID NO: 23 - DNA, 377 bp, homo sapiens
  misc_feature 124, 175, 320: n = A,T,C or G
ccagaaagcttcaccaaggggcgagcatgattatgcatgagcttcttaaatctggacttcccgacagcttctcatgacaggtcttctgtggaagactccttagattcagaccatcaggcctttnaaaagcacaggaacctactttacctcgcccaactctacggatgggataggnacttacaaggacatttcctcattggattccaatgttcattctccccttctctctctcaattaatctccccctcttctctttctatctacacacacacacacacacacacacacagagagagagagagagagagagagagagaganagaaacagcttcttcacagcgggaagcaggggaagggtatctatttccggcaagatc

SEQ ID NO: 24 - DNA, 379 bp, homo sapiens
aaagtcagctagggcgactgagccagagagatggggcacacagcaagaggagacctgacaaagtgcaggtgtgtcctagagaaggcaagcgagaccactgcatgattggaataccagccaacccttgcctgttcttgttccagcaaagtgcccttttaaaataaatttatgtatatagtctctgtgtgtgtgtgtgtgtgtgtgtgtgtgtgtgtatagacatatagaaatatatattcctaattcagaactcattcgtaagtgcacacactgacatgtgtttcatgtttcccaatttatcccagagcctatatgcagtgtttggctgcacaagtaggcattaaatgcaaccactgggaatgagaatggtggccacaac

SEQ ID NO: 25 - DNA, 370 bp, homo sapiens
  misc_feature 24, 97, 104, 274: n = A,T,C or G
agctttgaaatcccatccaaactnattggcgtttcaaactgaatcccagatgttcacttactgagaaataaatgaatggcccaattcgtggactgangcagggnccctcacaaatagattccaggtgtgttggcctctggaccactatctttctctgttttacatacacatacatacacacacacacacacacacacacacacacacacacacacacacggcaccaagtccatcctgaaaagaattcaacgtcatctccaagttagagccagtntaggatgaacagaggtagttacctaacacaaataacatattttcaattgtggatgaaggcaaagggctccacattcacactcttgtgccttcaata

SEQ ID NO: 26 - DNA, 154 bp, homo sapiens
ggcatgggatgtttgacctaagagatggactaaagccaatgagtaaaaatgtaaagcgtacttagtcaaataaattcttctctctctctctctctctctctctctccttattcatcactcttgggccgtgatgatgatgagggagaggagcagt

SEQ ID NO: 27 - DNA, 390 bp, homo sapiens
tatttgcctgcctgggttagatgattctccaggcttctacacaattttatgtttatatgaaaatagccacaaagggaaaagaggacaataaaacaagagatatgaataataatgtattgtatacttgaaatttgctaaaagagtagatctcaagtgttctacatacacacacacacacacacacacacacaaaggtaatgaatgagatgataggtgttaattaacttgattgtggtaatcacttcacaatgtatacatataaaaacatcatgttttacaacctacatttatacaattcctcaattatatatcaataaacctggaaaaataaagatgtataaaaaagatttacaaataagatttttaaaaaaggattgtgaggaaacaaag

SEQ ID NO: 28 - DNA, 192 bp, homo sapiens
accagctaacctgccatgagactgttgtgtagccatcttcacctcctcatcttcagggaaggggatgaaaatatctgtgcactgcaaatgttaactatatatacacacacacacacacacacacacacgtacagtaggccctccataacctgaggttccacatctgcatattttaccaactctggtccctgc

SEQ ID NO: 29 - DNA, 242 bp, homo sapiens
ttgttcctgaatgggaggaggactggtgagtgagggggaaagaatggagacaggactgagaagaaccagaaattaaaataatagtagtaatagcctaacatgtacacgtatatgagatctatctatctatctatctatctatctatctatctatctatctatcatctatatatctatcatccatcatgtatctatctatttgcatatataagctataatatctggctctgttctaattgttt

SEQ ID NO: 30 - DNA, 249 bp, homo sapiens
ccaggcttggatgagagaataatcttaaggaagtcagcatatgttctagaaacattcagaagacaaaagagtctgttatgaaagaacaaagtatttgtaataataaattgaatgttacatggacacacccagacatacacacacagacacacacacacacagtttttcttctctctctctctctccccactcccctctctcatactttgcaaacaagctcctcagcagctggtaagctgttccctgtcc

SEQ ID NO: 31 - DNA, 305 bp, homo sapiens
tcctgactgctcaaagctcaaggtgttgcctttttcaaatgggatgcaatagcctactcattttccaagattaaagctagagagaagaatgaatgaatgaataaataaataaataaataaataaataaataaataaatgagcaaagttaatattagctggaaaaaatagggtacaggtggaaggaatgaacccatattgagagtccactatgtgtcaaattccttgcatggaatctctaaggtctgtctagcttaaaagcaatgccagccttgctatctgtacttgatgaggagatggatcggaa

SEQ ID NO: 32 - DNA, 353 bp, homo sapiens
ccaaactgcaaacccaaacttctacaatgaattcatgtgcaacttattctaaaagatctatacacacacacacacacacacacacacacacacacacacacacttcctgtcctattgctcttcactacttccttcatctctgtgctacaatctgggttcatttttcttccccttgagtaatttattatgttttttacagtgagtctgttgctcaaaaattcttttagtatttatttgtataaaaagtcttaattttgtcttcatataaaattttgtttgacactctattataaattgactgttattctctttccatgttttccggacatagttccattgtcttctgacttcca

SEQ ID NO: 33 - DNA, 267 bp, homo sapiens
  misc_feature 4, 55, 133, 189, 227, 228, 252, 259, 263: n = A,T,C or G
ttcnaccttatgggtatatcgaattgtaaccccgttgtaggtcaaggagcatctncatatatacatacatagatgatagatagatagatagatagatagatagatagatagatagatagatttaattctaaantttccaaatactctttcatttaaatgattatagttttacaacaatttcatatattntataggtaggagaattagggttttccagagaaataganncaataggctgtgtgtgtatataangatttantttnaaga

SEQ ID NO: 34 - DNA, 299 bp, homo sapiens
gttgggcatgatggtgtgtacctatagtcctagctacctgggaggctgaggcaggaggatcccttgagcccaggagtttaagactaacaagactccatctctgaaaaataaggcaaaaaaagtatgaagaataaaataacaatcacttacattccaaccacctataattaatcattgccaacacctgaggatatttgcttccaatctacaagactgcattattattattattattattattattattattattattattattattattattgagatgggggtttctctttgttgcccag

SEQ ID NO: 35 - DNA, 393 bp, homo sapiens
gcagacagggttcaaattccagcctcccctcatattagctgtgtgatcttaggcaagtttattcatgtgtaaaaagaaataataacctcttctcgtggggttgcaggttaaacaaaagagtaggtattaaaacaactaaaagagtatgattggattgtttataacacaaaggataaatgcttgaggacatggatccccatcttccatgatgtgatttttatgcattgtatgcctctatcaaaacatctcatttactccatatatatgtgtgtgtgtgtgtgtgtgtgtgtgtgtgtgtgtgtgtgtgtgtgtatgtgtatgcacacactatgtgcccacaaaaattaaaaattttaaaattaaaaaattttaaaaataaacatgctgctgggc

SEQ ID NO: 36 - DNA, 201 bp, homo sapiens
agctgccagcacacaaggcccagaggtactttattggatgccaaattcttttaacacaccatgagaaaagaagttgacaactttcccatgcattttggaaggtgtgttagaacgattcaacacacacacacacacacacacacacacacacacacacacacacatttattgggttgggggagccttaaaacttacaaatct

SEQ ID NO: 37 - DNA, 246 bp, homo sapiens
aatttcttaccctttatccccgtcttctactcccattccacatgccccccaccccccatgaatgatttgtctaatgcgttgaatatgcacgtgtggttttgggtgcatgtatgtttacacacacacacacagactctctctctctctctctcacacacacacacacacacacacacacacacacactcatgcctctcctttgaagaggatcagatatggacagcaaagggcattagcatcttagct

SEQ ID NO: 38 - DNA, 351 bp, homo sapiens
gctccaaagttcctgattccaaagcctaagttaagccatcttaacttatatttcaggtgactagtggaattttttatgcccagtgtaggtggtaatgacgatggagatatggcgatgatgatgatgatgatgatgatgatgatgatgatgatggcagtagtggtggtggtgttggtgatggtgttgaagatcaccatgtctgaccactgttgtctgtgtcctttgtacaattgttcagatgcagtgtcctggttgtcacatagatgtctctgactgttttacaggccttcacctaccaccatatccaggagatcatggtccagctgctgcggacagtgaaccggacagtca

SEQ ID NO: 39 - DNA, 364 bp, homo sapiens
ttaacccactgctcccattttgctggtggaaaactgaaaaccaaagagattaagtcatttacccaaggtcatgtaactaatatattgaatctcagatgttttaatgattttgactcatttccaatttgcctggctatatagagaaaatatttgaggaattgacagggaacacacacacacacacacacacacacacacacacacacacacacagagggagggaggggagagagagagacagagacagacagagactgaacagattatttctccactgatgttcattatttagatctattttcaacatttaaaggcaattgtcagcatagtcaattcagccattttaaaccatcaagggccaatg

SEQ ID NO: 40 - DNA, 161 bp, homo sapiens
gcaacctatttgttagcagcacatgcgtgcgtgtgcatgcacgtgggcacacacacacacacacacacacacacactctttgcaggggaattttgagccagaaatttatctgtaggcccatattcattcctttttgcacatttctattgtgaccttgggca

SEQ ID NO: 41 - DNA, 269 bp, homo sapiens
caattccacacagctggagagtaacaaagccagaaatcacatccatttgtgtgtgtgtgtgtgtgtgtgtgtgtccaaatcctgtgattccagtgccaggatacactgtcttccgtgttcaacagtcatgaaagtattttaatgaacacctggccctgcagtgcctgatgtagcaaatgctgcagatactccacccaccgactcttggaccacccaaaatccactggcagcttcagtgaggctttcctacttctttctttccctgggct

SEQ ID NO: 42 - DNA, 251 bp, homo sapiens
cactggacttggagtcaggacatcattttaacagctttatcgagatgtaatttacatgccatacaatttacccaaagtgtacaatcattgactcttagtatgttcacagagctatgtaaccatcaccacaatcaattttacaacattttcattactcctaaaaagcaaacctgcaccccttagccactgctctgccaacacacacacacacacacacacacacacgcgtgcgcacacacacccaaacactc

SEQ ID NO: 43 - DNA, 141 bp, homo sapiens
cgcgtgtacctccacatagatgtttgccaatgcctatgcccaagacacacacacatacacacacacacacacacacaggatacattcaagcacacactaatgtatgtgcacttgcctgcacagagtccacatcacacaggc

SEQ ID NO: 44 - DNA, 328 bp, homo sapiens
agcttctagtctgctatgttgctaattgtcttcttggtcatcttttaaaaccatttctgtgaaattatagcctccttactcccttaccctgagtctggatgtttctgaagatgactgatctctacagtgagaaggccctgggaattgactgactcactctctctgtctctctctctctctctctcacacacacacacacacacacacacacactcatatacatacacacatagatacacatatacatgcatccacacatgcacaccctgggcacacccacacaccctacaactgcacatgcatgcacacacataatgttaactgaagg

SEQ ID NO: 45 - DNA, 313 bp, homo sapiens
agcttttggctatggaaccttaggcaagatgttcataaaccctttaatctctagtgcccttgttcataaaaagaagtgaatcggatccctgcaggactgtttttgtattcagtgcacaggtgtgtgtgaagacacccagcatgttgccaggcacacagagatgtctaccttgatacttttctctcctcctccccgcaaatacacacacacacacacacacacacacacacactcacacactcttattttgatcttggcctgaggctgacaagccccagattagtgatcagtgacaatttcggctttatcagct

SEQ ID NO: 46 - DNA, 242 bp, homo sapiens
cgaggatgcacacctcattaattgaggagctaggatttagatccagagcctcatgattctaaagcctgttttttgtttgtttgtttgtttgttttgttttggccacactaggtttctagaaacttccagttccttcttaaaagtcctttttgggcattccggcctaaatcccaaaactgtggtctgggtacaagagagaattaggccagtgagaaaaatttaaaccaccctgccctctaaat

SEQ ID NO: 47 - DNA, 623 bp, homo sapiens
cttgatgtcttctttcaccatcccctggcacccgcctatacatttattacttgaaacagactgacctttatttggttaggccactgtggtcaggtttctgcaacatggggtcacatgccttcccaactgacacaagtctcaagctccttttctcttctttttataacttctagaagcatagcttctaccagataaggatctaaccttttcagtggaaaacaaaaatggcaaagaagtaaagaaagaagagagagaaagaagaaagaaagaaagaaaagaaagaaagaaagaaagaaagaaagaaagaaagaaagaaagaaagagagaaagaaagagagaaagaaagagagaaagaaagagagatggagagagggaaggaaggaagaaaagaaagagagggagaagaaagaagacagggaaggaaagggaagggaaaagagggaaggggagaggggaggacaagggaaggggagaggggaggacaagggaagggaggaaggaagaaaggaaggaaagaaggcaggaaggaaggaaggaaggaaggaagaaaggaaggaaggaaggaaggaaaaataactagggcctttcacttttgccttcaatagcagagtggccctggatat

SEQ ID NO: 48 - DNA, 372 bp, homo sapiens
tattggcagagggtgagtccagtgtataaaagcaactatatttgtgcaataaggcaacctctaaacacaagttactacttcatctaatgccacacacacacacacacacacacacacacacacacgagtcatctgttccaaggctgttgcctttactaagtgatgctatgttggtccttgaggtggtgccttcctgagggttttcaagcatagctttggccatgcacagttttcttcttatacacactctgaggagccccgccgtcacggtaatgcacctgcctcacaagctggtgggcagcttaaatgaaatacacattttgctccaggcccagcactagctcatcaatgtgagctggtgttagcctcacc

SEQ ID NO: 49 - DNA, 140 bp, homo sapiens
cagtagccaggaagctgaggaacacacacacacacacacacacacacacacacacacacaaacacaccccttcctggctccagttccgcaccaccccacacccccaacaccggaagtagatttctcaataggcagggctg

SEQ ID NO: 50 - DNA, 301 bp, homo sapiens
tttgccagaatgtcctcacaccaaatagtggaccccttcttttgctgatttatctgctattgtataggtgtatgtgtgtgtgggtgtgtgtgtgtgtgtgtgtgttaaggcaggtggtagtatgtgtagggtagggtttccccagtcacctggagccctgagtgcctgcttccctaaactaggccagtttagctgactggcttcctttgtgtattggtccattctgcatcaaaagcatctgaattttcattcaatctctcttctgaattttcacttttaaaaacctgaccagtcccttgtg

SEQ ID NO: 51 - DNA, 203 bp, homo sapiens
ctcctccatggtagggactggttctcttaggcccctgtatcctcaggcccagcatgcttgggaaaatgtttgctaatgctttgtgactcaaaaggaatcacacacacacacacacacacacacaaacacacacacacagtttttaatattatcagtcatatcagccccctgaggcagctgctctgttccagacaaaccctgtt

SEQ ID NO: 52 - DNA, 138 bp, homo sapiens
gggtacaggagagttgtggtgggcattagtactactcctgctgctgctgctgctgctgctgctgtgtccactgttagtgacagaagtgggaaaatatttaagttgagttcacattagtgttcccagtttagcgtgagc

SEQ ID NO: 53 - DNA, 250 bp, homo sapiens
ccatgagttcaggcagtgggttaaataagatttcccttgaagtcgaatgaaatcacaatgcaccacacacagggacacacacacacacacacgcacgcacgcacatcacacacacacacacacacacacacacacacacacacacatacacacacacagtctccctggggccaatctactgccccctgaacctcacccatcagccaggtgcctggccccgggtctgtctcttagggttacatgctcccgg

SEQ ID NO: 54 - DNA, 664 bp, homo sapiens
acttatggaacacctactcagtgccaggtattgttgtagatgccaggagtacagcagggaataaaacaacatccctgtcctcgacacaaacacacaagtaaatagagaaggtcagagataaatgctgtgcaggaaaacaaagcaaagtgagggatggagagtgcggaaggttggggcacttttgtttcagatgagtgtcagggaagcccccttggaggaggcactgtaagggcacagaatcgaatgaaaggagtatgtgaaggtgcttaaattgtttctgtttggtttggtgtggtgtgatgtggtgtggtgtggtgtggtgtggtgtggtgtggtgtggtgtggtgtggtgtggtgtggtgtgatgtgatgtggtgtgcggtgcggtgcggtgcggtgcggtgcggtgtggtgtggtatgggttgaggctggccttaggagcctgttggccttccaggccagtcctgaagcccagcccagagcaccagactctgcagtcagtcagtggagggcccacatctcagccaatgcatggctttgggtggtgacttcatctcccctagtgttcctttccccctctgcaaaatgggaatggggatggctcagaactcccagcgggagttaggaggaataatgtataggaagtatgagcagagtgcctgg

SEQ ID NO: 55 - DNA, 120 bp, homo sapiens
tgatgtgctcgttcccatagccccgctgtgtgtgtgtgcgcgtgtgtgtgtgtgtgtgtgtgtgtgtgtgtgtgtgtgtttggtggggtgggaggggaggcagaagaggaagagagggca

SEQ ID NO: 56 - DNA, 139 bp, homo sapiens
tggtgatcagctcagtgtccttggaaaagagcagaaagtggtatcacgaacatatcttctcctttgcttccttctcctcactcttcatcatcatcatcatcatcatcatcaaatatggatctgtgaggctacctctggg

SEQ ID NO: 57 - DNA, 340 bp, homo sapiens
ggaggagagaccagcattcacattcagttattgttgttttaaatccattacgcacatacataggagaaaatttcagcaacagtcaccctctgaacccagttcctcagttctctccagaggcaactaaaatgctcaattattagtgtatccttttggaaatattttatgtatatgacagtgtgtgtgtgtgtgtgtgtgtgtgtgtgtgtgtgttcctttccaatattaaaataatattaacattggtaatagtggtactaaacaacttagggtgttttttttttcatttaatagtatatttttagtatctttccaggaaaagatacatggatgtgccaca

SEQ ID NO: 58 - DNA, 362 bp, homo sapiens
  misc_feature 49, 53, 57, 259, 322: n = A,T,C or G
tcaataaatgattctggggatgtgtctgtctgtccatctgtctctctcnaganacanatacacacacacacacacacacacacacacacacacatcctgttagttctgtttacctggagaaccttgactaacatacccattaaaaccaaaatatgtccttcagggtgttaatgtttggttgaagaaacacagaagtttaacaattgtatcaggctgggcacggcctataatcccagcattttgggaggccacaatgagnggatcacttgagcccaggagttctagaccagcctatgcaacatagtgagacaaaaaaatgaanaaaattaggggtgtggtggagcgcacctgtagtcctagct

SEQ ID NO: 59 - DNA, 187 bp, homo sapiens
gagttctatggaacagcatttattgaataataacatttcaggaaaaaatataagctttactgtatattaaaatacatatatacgtttatatattatatattatattatattatatattatatatattatatatattataatatttatatattatatagatataaatcaactacaagatccagttcaa

SEQ ID NO: 60 - DNA, 219 bp, homo sapiens
ttgcctaagatctaggtgttcaaaagaatttctccaatccacttcagcctgttattatgtatgtattctgttttaaatgagaaacaagagtcattttctccagaataatagaaccatagtgacacttgaagtaagtccagtggtcctgatatgataataataataataataattattattattattattattattttgagacgaggtctgtatctgttg

SEQ ID NO: 61 - DNA, 302 bp, homo sapiens
atggagagacacggagttgcttgagggtacagtgcctgtagatactcaataaatatttgtttaattaagaaaatttctgttatttgtgtgctcatacataccatttcagtctggtgagtattgttctttcctagagtttacttttaatcttaagtattttccaggtcctttgttgacttctgtttaaaccacagtacacacacacacacacacacacacaacttttgtgtactataatagcttccccaaaattataatttagtcattgtgatgcagatcttcttccaaggcctctactttgg

SEQ ID NO: 62 - DNA, 368 bp, homo sapiens
aaacaaacaaacagaaacaccaaaatggattccagcatcttataagtgctttctcttatgatcgagagtaagacaagcatggctactcccttctcttctattaaatattgtactaggggttctattgagataaataggcaaaaaacaaaacaaaacaaaacaaaaaggcatccagatttaaaaaaaaaaggaatctaggaataaagggattacatctctacttgcagatgacatgatcttatgtataggaaatcctaaggatccactgaaaaactgttagaactaataacatcagtaagtttgcaggattataagattaatacaaaaactcgactgaatttctgtgcacttgcaataaacaacccaaa

SEQ ID NO: 63 - DNA, 247 bp, homo sapiens
tctgcccacacactttatgctttaaaacaaaaggccatgttgaacttgtagaaccaaatgattgctaattacttggggcgatactagtgatatattatcttacatacacacacacaaaacacacacacacacacacacacacacacacacggcttgagtccagcatggcctactgattttaaaataggaaatgacagtgtaaatgccaggataaaggacaaagtgctctgacctgttgccaaacctt

SEQ ID NO: 64 - DNA, 270 bp, homo sapiens
gggtttaggacccacgtatcttttgtttgtttgttgttgttgttgttgttttggagttcaacatgtttatggtgtgtagccatggttgaaagcttttattttataagatagacaaagcaggaattattattctcattttacaggagaaaaacagaagggctatgtggtttgttaaaaggccacacagacagtaaagaacacagcctttacatggtcagcctcacattctagtactcattttattacactgctcttcttctctgttgcctg

SEQ ID NO: 65 - DNA, 261 bp, homo sapiens
ctggcctctttgcccattttctaattggattatatgtggggttttgttgttgttgttgttgttgttgttgttgttgttttgctgttgtgacgttagagttccttgtatattctagatattaatcccttgccaattaatagtttgccagtattttctcccatcctgtaggttgttcactctgatgattgtttcctttgctgtgcagaaggtatttaatttgatataatcccatttatttacttttgtttctgttgcctgtga

SEQ ID NO: 66 - DNA, 304 bp, homo sapiens
ccatccagggtctaactccagcatttgtataaacttggacaatacttttgctacagggttgtcattgaaagtattgcctcattatatttcttagtggtccctgtatgaagccatataagagaaacttcttaatttagcactaggaaatgcttctgttgacttgagatgtgtgtgtgtgtgtgtgtgtgtgtgtgtgtgtctgtgtgtgtgtgtgtgtgtctgtgtgtgtgtgtattcccctaattgataaactataaaataatctttctcttttcactttggccatctggaaatttgccaccaa

SEQ ID NO: 67 - DNA, 371 bp, homo sapiens
tggcttcccaatcctagaaaaggaagaaagctgcatgttgttgttgttgttgttgttgttgttgttgttgttgttgttgttagatggagttttctgtcgcccaggctggagtgcagtcacatgatctcagctcactgcagcctctgcctccctggttcaagcaattctccagtctcagcctcccaagtagctgggattacaggtgcgcaccaccactccaggctaattttttgtatttttagtagagacggggtttcacgatgttggccaggctggtcttgaactcctgacctcaggtgacccacctgcctcggcctcccaaagtgctgggattacaggcgtgagccaccgcacctggctgaaagctgcat

SEQ ID NO: 68 - DNA, 258 bp, homo sapiens
gccttcgcagattgtacctcttcctttcacccttctcgctggcctgtgcttctctctccatcgtggtctcccacgccttggtttctcctccatccccatccccatctttcgtgagcccctccaactctctccccgtgttttgtacggtctcctgcgttcacttgatttcctctcacccacccccgccccaaacacacaggcacacacacacacacacacacgcgcacacacacgggcctctcgcactctccttctcct

SEQ ID NO: 69 - DNA, 226 bp, homo sapiens
tgactcttggcctctgtgtgtctctgggtttctttgtctccctcctctccacggtcctcttgtccttttgtcttccctttcttgtttcttgaatctctttgcctttatgtatctgtctttctctctctctctctctctctctctctctctctctctcttctttcctttctccctgactccctctctccctcttccaggcccagctcccagtagctcctaaggcaaa

SEQ ID NO: 70 - DNA, 215 bp, homo sapiens
catttgggataaatgttgtctttagttttcaactactttttctttggcttattctctctctctccctccctccctctctctctctctctctctctctgtgtgtgtgtgtgtgtgtgtgtgtgtattcatgttttcttaatctatctgaattgttgtgtcggttttccatgcgaatttccagttacctccacagtattcgtttcagaatgcttcct

SEQ ID NO: 71 - DNA, 370 bp, homo sapiens
ttgcagtttcatgaaccaagtattactgcctcaacaattaaaaacaacagacaaattatttaaaaaaccatgaggcgagtggtggctggtggctggtggcagggcgggggcagggtggcctctgtgtctcatgctttctggttggtctgtggtctttgcactgagagctagggccttgcacattcattcattcattcattcattcattcattctttgaattcaacattactatgcaccaggcgctgagaaggcagccttagacagatggaaatccttgctttccgggagattccattctaatgggtcattgattcagtggcctcttcagtcatttgttcatatgcatttactcgtacctctcatgtgcca

SEQ ID NO: 72 - DNA, 339 bp, homo sapiens
aactgaacctgggctgtgtcagtctaagacttatgcttggaacctgtaagaagaacaagtgtgcgtgcatgcatgtgtgtgtgtgtgtgtgtgtgtgtttggagggatagtgaagttttttcctacagctacaaatagaacatgctttcctatacaattgtactaatcaatattatttccttacattatctccagccatttccctataattagacattcagattatttcaaggttgttattcctataaacagtgatgtgatgaattttttaaagttggttcctcacatccgtctgttcttgtaaatgtatccatcatagaactggaccacaaaggttgg

SEQ ID NO: 73 - DNA, 150 bp, homo sapiens
gggagttctctttcttcaagtgcttaggggagaaaataagtgagaaaaagagagatagaggaaggaaggaaggaaggaaggaaggaaggaaggaaggaaggaaggaagaagaagaaaaggaaacgaaaaggaaaggaaaggaagaaagga

SEQ ID NO: 74 - DNA, 331 bp, homo sapiens
tccatgttattctctacctgttggttccttcctcattgaaaattggtgtatagatggtagatagatagatgatagatagataggtagatagatagatagatagatagatagatagatagatagatagatagatagatttttatttttggtctatctcctttactaaacagtaagctccatgaaaatatggatcatcactgtcttattcaccattatattctcagcatatggtattgtcctggtatagaatagattctcaataaatgcttgctaaatgaatgcattcatgagtgagtgaatgaatgaatatgcgagtggatgagtgtgtgga

SEQ ID NO: 75 - DNA, 370 bp, homo sapiens
tgcttgagggcaggatctatatgtaattcctttctggaaaaccagggattgaaacaggatctggcatgcaatgggctggatgggtgaatggagaaatagatgaatgacagatggatggacaaacagatggaaggaaggatggatggatagatggatggatggatggttggatggatggatggatggatggatggatggatggatggatggatggatggacagatggattggttggtagatgtgtggatagatggatgggtgaacaagcgagtagatggatgagtaaatggctaaatctggtgcttttcttccagaatcctggattctgaagggaggctttgcagcccttcctcgtggatcacttgctctg

SEQ ID NO: 76 - DNA, 251 bp, homo sapiens
ggctgaattactgggcatgtttctgagaagaaagaacttctattttaattatatatctacagaaaccaaattgcctgcttacagttttacatgtctgatgattggaagtttttgtttgtttgtttgtttgtttgtttgtttccacagactagcctctgactccatatatttcaaactttgttcctcttccactacccacatatttctgatgtgagacattctagaaaaatttcatattgcaagacggcttc

SEQ ID NO: 77 - DNA, 363 bp, homo sapiens
ttggcaggattcagttcctcatgggcaccagacggagagtctcagcaaatcactagctggtgactgcagccaccgcagttctttatcacgtggttctctccatagggcagttcacagtgtggtaacttgcttcatcagagcaagccaggaagaagacccagagacagacagagagagagagagagagagagagagagaggaggcctctgaaagagagagagaagagagagaggcaaagagagaatgagaactccagaagtcactgtcttttatagcctaatcttgaaagtgacattcatcactttcactacattttcttccccagcagtgctcagtgggaggggattatacacggccatggat

SEQ ID NO: 78 - DNA, 203 bp, homo sapiens
gcacatttgcagaggtttgaggtcccatcattagccatgcttcttggttcctgcactatgagtatacgtatgtgggctgatggcctcattcactggatacacacacacacacacacacacacacacacacacacacacacctcaccagggacttgggagtatctaaatgtttgagaatcatagagcagggagacatccaacac

SEQ ID NO: 79 - DNA, 326 bp, homo sapiens
gggcacatacagctttccttgcaggaaaaaaacctgcttaactttgtttattatatattatttgatctgtgcttcatatattattcatatattatttgatcaagttgcttcatgtattatttgatcaaggaatcatgtgtgtctacagcacctattaaaattccctggcactgaaattctgtagaaaaccatttaggaaaagttgatctaactgtataattattagtaaaacatatacacacacacatacacacacacacacacacacacacacacaccacaagcaaacaaaaaaaaaccaccttaatggtctcctaaccaaggca

SEQ ID NO: 80 - DNA, 266 bp, homo sapiens
gcatgttcgccacagagattcaattaatttaaataggtagaggacttggggcagtgcctaggacaacattacactcagggatggtgatgatgatgattataatgatgatgatgatgttgatgatgatgatgttgataatgatgatgatgatgatgatgatgatgatcatgatgataatggaaaagaagatagaggaggtagaagaggagacaatcatgatgttggaggtagactccaatcttcagaatcagaagctcagggttgga

SEQ ID NO: 81 - DNA, 224 bp, homo sapiens
  misc_feature 18, 197: n = A,T,C or G
agcttaatctattatttnagaggcagaaagttaacttgcttatcctgaaaagaagtgcaaatatatcccaaaagtgccattctttcattcatccactcaaacagatacacacacacacacatacacacacacacacacacacacccttttcaccccttggtagtgtacagtctctgagttgtaaaaaatagtcattnctttctgcttgaaagactgtattagct

SEQ ID NO: 82 - DNA, 328 bp, homo sapiens
ccagcatgatcctatgaatccttataaaagggagatgggaaaatttcacacacacacacacacacacacacacacacacacacacacacacagatagagacagagagaagaggataaggcaatgtaaccatggaggcagagatgggagtgctgtagccacaagctaaggaatgctggcagccacagatgctggaagagttgaagaatgggttccccctgagggagcacagccagatgcatgctttgagagttcagcccagtgctactgactttagacttatggtttccagaactacaaaaaattaatttctgtcgtttcaaaccatcc

SEQ ID NO: 83 - DNA, 257 bp, homo sapiens
caaacgtcgctgacctgagtctgacctgggctgcctcgtgttaccaacatgaaaagggagtgagaaaatctgaggccaattaacttctctccctctctctctctttttctccccttgcccacctctctctctctctctctctctctctctctctctctctctctctcttttttccccctcctcttcttggagacatgatgaaatttcctgaaacaaaaactcgcagcccgttcaataaaatgctttcgcctttggtg

SEQ ID NO: 84 - DNA, 223 bp, homo sapiens
acagttgccatttgctcatttaaaatgtagtgaggtgttttaaagagggtttgttcaatttaccaaaaagggaaaaaaagggaaaagaagaaacttattgttgaacgaacacacacacacacacacacacacaaagagcctggcttaatttagggataaagcaaagaagtcaatacccccacatcaactattgaaacctaagctattgctggagttgacagcg

SEQ ID NO: 85 - DNA, 364 bp, homo sapiens
  misc_feature 7, 61, 86, 339: n = A,T,C or G
agctctncctagcattgttttcctttgcttcatttcctcttaaatgtgttggatgcacttngttcctgctaactaatctatctttncagtttcaaatcaaatgaacccagagaatttatttttacattattatcttcagatttagatttgttttgcttttaatcctgtcttcatgaaggggaaagccatgtgtaccagcatggttgataaaccaccaaatcgtgaaactttgcttgctccccaaacccccaaccacacacacatacacacacacacacacacatacacacacacacacacacacacacacacacacacacacaacctgggaaattgggnagaaaactggcaaaccttaaactag

SEQ ID NO: 86 - DNA, 619 bp, homo sapiens
cctgacagccctcacggtcattctctgtgctaggaacggtgttgtcttacctcaccaggaaggcagtctgagggagaagagagggctttacagccagacacacctgggtggggcttgggtcaagtgtcttcatctctctgagtctatctccccaacttttaaaaacagacagtgtatgtactacataggaggggctctcataactgccatcccttccactttcctaactttgccccyatacaccctcacccccatcaagcccttgcccaggacagatttggacagctctcctctactcagataaaaaaaaaaaaaacaaaaaaaaaacgaaaaaacggtatccagatgcaccaggtgtctccaagttgaagctttaaaaacctgtgactgaaagaaaaaaaaaaagttctcattccttatcattgcaaagagcccataggatctgattagtttatcttctcaattccaaacaaagccagatcaataggtttgttttaaagacactctcatttggcttcacatggctaagtacttaaaattaatcataatcagttattccatgggtttttaatttccagcagaggcacacagctttgaaaccatccatcttaatggtgag

SEQ ID NO: 87 - DNA, 1095 bp, homo sapiens
cccttttacccaaaatctaatcagaccaatcctaccttccaaatatcacttttcatttccttttctcttcccactgctgtcaccttgtgcatgggctattacagctgtcctatctgcatcccaccatcctctgcactgcacgtggagtaacctttctgaaacctccattggagcttgacttgactccacttaacatctgaagatctttccgagggttccccactacccagactctcatcattgcatgtgttcctctgtggtctggtctggtgcctgcctgcttctctgttctcatggtgtacacactcaccacactccatttgcttcatattcactctgtctgtctgtctgtctgtccacctccctacctcccctctctccctcccctacttcctctcctcataccaaacctcttggtgatccccagtgggtcatgatgtataaacatttgcacataatattgcctctacctgtcataaccttgtgataaccttaccgcacatagagtgtgctaagtgtccagtgctcccagagacccctgggcatgcctctaggggaccactcctataggtctgagttccctcrgcacccagggtagggccctctctctctagtgaattgcagagggcctgcacatgggaagtgctcacagcctgcctgcctccctgcctgtggaacaaatgggattgaactctgaccctaaaaggactgtgacggtgatctcctgggacatgcattctagggccctccaaggcagttcctcttcctcatatttcacctgtcgtgtgcatgtcactcctctctcgactgtgaaatgggagcacctggaaggtggtacccagcagcaatggacggtctctggagtcagactggcactccagacccctctcaggcactgaggagttgtgtgcccccttaatatgtgccaaactcactttcctcaactgtaaattgggggtggtcattgttatcacctctaaggattgttgcaaggattaactgagataatttgcataaagcacatagtctacatctttgctcttcaataaagggcagccattgctttgttatttcctagctgtaccttctacttga

SEQ ID NO: 88 - DNA, 644 bp, homo sapiens
tcatctcagttcacccagctggtaagcgcacaatgggatttgtgggagcctacacagccctgaagctgaccaatggtcctctgggacatgtatgaccctgagttaagagtagacgcagttctaggtgatagttcaagtccccctgagctctgaagtacataattcacagattttttttttttcccatcactaataaccaaacatttggagaaataacccctggcattcttaaggcttctgtgcatcagaggtggtcacaaggtttacaatttaaagaatatttggggattaaactcagaaaaccaagccaccacagtgccacacttctgtcttttgtgggtgtcttaaaaatgaatgctttcttatcgtagtttctgaccagaggcagcttcctttaaaggctaaaggaagcagcccgtctcagctccagcaggtcagtaatgtgacgagataaagggcagttccttaatgaaaaccactctccctcctgccagyaaaggagttttcttagtgcatttcaagtcctctaacacctcttcccagatcaatggcttttcataaatgcaccaggagatctttgaaccactaatgcttcaggggctgtttaggtttggagtcaaactgtttaatataactctcctcca

SEQ ID NO: 89 - DNA, 840 bp, homo sapiens
aggtcagcaggacagccaagccctgactcagcttcccagccacagtgtgaagcgtatgagtgtgaaagtctctccttcagagaaaagaccagtggtccaaagaccctgcccattcccgtagctgtgcttccccaaagaatctctgaggaggttgacataatggtgaagtgctcagactctggagtcaggctgcctggagtcaaatcctggttcttaccacctttatgaccttaagcaaattgcatgcctcctccttagcctcagttaacccatatgttaagtggaaataatataatccccctttatgatgttgttttgaagagtagtaattattattgctgcttttattccatctctgagaattaactaggcccaggttatcacatcttagagactaaatcttcccttcctagacaaatatgtgcccccmaaaaaagtcatatttatagtttcctggctctgaaatgaccctccctaactagtaaagatatttaacttcatcactctttctgttatttctttgagtggggctgacctcttccggcatatggcttctaatgggctaggtataaagtaggccagagaaaaagagggtgtaacttccctgccctgtcccttcctcttgtccccaccaagacatggaaaggacgaaaagaactgaggagtcccagctccgctattaaccgctgcctgcctagggtaggctgaaaaatggctcttctaaaaatgcctacatcctaaactctaatgtatgtgaatgtgtactccacatagcaaaaaggattacaaatcaagaattcaggttcttcaagtggatagattatcctggattatttgagg

SEQ ID NO: 90 - DNA, 401 bp, homo sapiens
gggtgcagtgtgtgcaacaaataacccagcctcttggctcgtggcctggaggtgcaagaccacccacagagcctgccctggaggcgagctgctccgcctggtaaccatttcagcaacggccatcacttgaagaacaatgtgaatgcttgtagcagcctggggcccgagaccaaacagccgccatacactctgaccgcagagrcagcagcctgggtgggggggattgttatcatttaatgagatgcagatcaagacagcctgggtctttaatgcagtgtgcctcttctcttcttgtttagagatttgagtgaaaaccagatccaggggatcccgaggaaggcgttccgcggcatcaccgatgtgaagaacctgtaagtgatgttttccttgcttcactacgt

SEQ ID NO: 91 - DNA, 613 bp, homo sapiens
aatcagtaaacatatctatatgtattctagggtctggtgggcaagtgtacaaaatgagcaaaatgatagattcacctccttttgctcatttgagatgttgttttaatgtagaattacagtagccctcaaatgatgagaagcagtgacaattcattagcagattgtggcttagatcaagtgtttgatttctctgaggaagtgtaaccagtactcagttatatgaagtatatgcgtttcttwtgaagataatttttttccttttgtcagttaaaataaccttgagctttatttttttcaaagaccccagctagcagcagacaaatgcttctataatttgttcttcaataatgattttttagaatgttaaactgtcataaaaaaaaacaaccttcaaaagcgcttctagatttcctattctctgcttaaaggacaattggataatagggaggaaagaaatagcatgtcaaggctgcttcacattttgtcttctgccttggttcatgaaagcagggattcccccggttttctttttacagttacaatattctatttctcctccgtctagaaaaagaatacttcagatatgtacattgatgaacatatatatatttca

SEQ ID NO: 92 - DNA, 619 bp, homo sapiens; identical to SEQ ID NO: 86

SEQ ID NO: 93 - DNA, 402 bp, homo sapiens
gagggaaggagggctccacctgaataaaaaagtcagggcatgctcttctcgtctggagacctgtccacttgtcttcagctgctccactggctgggccatgactgttgactcatggtcttgcagtcacaaccatccctcccccgacctactacaagcatcttggtgcctcccctgctgctgcctggctgaccatctcccttstctatctccacagtaccctcaacaacaacaacatcagtcgcatcctggtcaccagcttcaaccacatgccgaagatccgaactctgtgagtaagaagtctgtgcatctctcccattttctccctacctcacgcccaaagtgcagcactctacgctgcttgtcaaacctaccatgctatgactaggcagatggttccgacat

SEQ ID NO: 94 - DNA, 402 bp, homo sapiens
gaagcactcagtgcataggagggtttcaggaagcgatactcttactcaaggtgggtaggcaagtcctgagaggacagtagagggaaggagggctccacctgaataaaaaagtcagggcatgctcttctcgtctggagacctgtccacttgtcttcagctgctccactggctgggccatgactgttgactcatggtcttgcrgtcacaaccatccctcccccgacctactacaagcatcttggtgcctcccctgctgctgcctggctgaccatctcccttgtctatctccacagtaccctcaacaacaacaacatcagtcgcatcctggtcaccagcttcaaccacatgccgaagatccgaactctgtgagtaagaagtctgtgcatctctcccattttctcc

SEQ ID NO: 95 - DNA, 403 bp, homo sapiens
gctattaaaaaatgagctttgctcagaaccccggaggcatcctttggatgtgacctggcaatgaaagggttggggctccaatgtttttggtagtgcagagggaattgcttcccctgggctcctagggattttcacactggagaaaggggcaacaggggttttggtcactctgtctggccagtgacagcctccacacttcacyctgtgaccatgccttctctctgtcccgccctctcccaggcgcctccactccaaccacctgtactgcgactgccacctggcctggctctcggattggctgcgacagcgacggacagttggccagttcacactctgcatggctcctgtgcatttgaggggcttcaacgtggcggatgtgcagaagaaggagtacgtgtgccca

SEQ ID NO: 96 - DNA, 402 bp, homo sapiens
cttaggatgctggttaaggacacagaagcccaggcagctcctgacactgacataagttgaccgttgtgtcttggctccacagccccccactcggagcccccatcctgcaatgccaactccatctcctgcccttcgccctgcacgtgcagcaataacatcgtggactgtcgaggaaagggcttgatggagattcctgccaayttgccggagggcatcgtcgaaatgtaagtgcacctgtctgacacccccaacaactgtcgccggagaattcagctccctgtcccagcccatcacccactaggccatcagcgtgtggggctgctggagctgaccattaaaaacactcaggaatctctttgctgtccttccacactttcccagctatgatagcttggtggtcaa

SEQ ID NO: 97 - DNA, 402 bp, homo sapiens
accgttgtgtcttggctccacagccccccactcggagcccccatcctgcaatgccaactccatctcctgcccttcgccctgcacgtgcagcaataacatcgtggactgtcgaggaaagggcttgatggagattcctgccaacttgccggagggcatcgtcgaaatgtaagtgcacctgtctgacacccccaacaactgtcrccggagaattcagctccctgtcccagcccatcacccactaggccatcagcgtgtggggctgctggagctgaccattaaaaacactcaggaatctctttgctgtccttccacactttcccagctatgatagcttggtggtcaagagcatagactcgagatcagaatcagcaagctatagcctagggccaggggttcccactg

SEQ ID NO: 98 - DNA, 402 bp, homo sapiens
gtagccccaacccccagcctacaaatcagacactctggagtgcatttttaatctacaccctcgtgaggtttgagaagcactggtcaagagtcatcccagtgcccagaatcagttctaggagcagctgctgtggctagggacaggtcatgcatggaggtcagtgggcagctggagccatctcccatctgccttccagctcartgccctgcattgtgcctccatcacaacaaaatagcagagggggccttgagctgataggagacttgagatgcttgctctgtgcccaaatggctgtgtccagtcacttatggctccaggtacttcacctctcagggctgctgtttccttcttgcagaattaagaattaagacgcagtttgccaaatgttctcacttatacatg

SEQ ID NO: 99 - DNA, 402 bp, homo sapiens
acttgagatgcttgctctgtgcccaaatggctgtgtccagtcacttatggctccaggtacttcacctctcagggctgctgtttccttcttgcagaattaagaattaagacgcagtttgccaaatgttctcacttatacatggaatctaaacaaagccaaactcttagaagcagaaagtagaatggtgatgttcagaggccrgtggggtgagggtggggtagagatgaagatgacacagatgttcgtcaaagggtgcaaaatttcaggtagacaggagaagtaagttcaagagatccattgtgttatacaacacggtgaatgtagttaacaacaatgtatcgtatacttgaaaatagctcagagagtagattttaagtgttcttaccacaaataaatgataag

SEQ ID NO: 100 - DNA, 402 bp, homo sapiens
gagtacagtagtgaaaaaggaggaaagagtagaacaaggagtttgatctgtaactgactgtgaacaatccattgagagaactcactacctttgaaccagcctaaatatgcagtttttataataataaagaaaaagacaaagtgaccaaggtcaattcccagctaaactgtctatcacttctccaattcccactctccagcrcctccaaaccgtggggcatctcacctcatactgtagggagagatgggtccagaagtctagttgtggactgaaaaccagtttgccctcccagagctaaagcagagggtttccgtgctggccacatagcttcctcttgcaactagaggtctcagcaccttgaagggacaattcataatcaggggaaaaaaagacaacacaggc

SEQ ID NO: 101 - DNA, 402 bp, homo sapiens
ctctccttccagtgacaggatcccagaggccatccctgagctaatgactctaagagaaagaatttcccctcagtgaagggccattagcaagagctggtgtccaggttctcagaagtcactgggatgcccgtaattgagcagcctacagggcctctgggaaggagccagggtcgaggagattcctttgcacctgcaaagccwggttagctgccccagaccccgggcccagcattaatagaatcctcctggcccacagcatccctcttgctctcattatccaaagcctgggacattcttatgccctggacttgctcccagatgaggaacacactgccagccagtgacaagcccacatctccaaggcgtccctgagaatcccaggatgtgcttacatcacacagc

SEQ ID NO: 102 - DNA, 402 bp, homo sapiens
ccgttatcgcacctttgagccatgttctcagactttaccgttaacgttttcagagacatcagcaagaatcagatatcggatattgctccagatgccttccagggcctgaaatcactcacatcgctgtaagtggggcccgagttggggcctgaggtgaggggagggggggcgctggagggaagagagacgcaaccatatttytcaggaggtgtttatcaagactttatgttcccttacacacttgtggcaacctggtaaaagaaacaaatatttcttcaggggaaattgatcttggggaatatttctacaacccaaatgcattatttttattgattaagcgcctggcagctttcccagttattggcttctaattcgaatgcatcttctactccaacctcacgt

SEQ ID NO: 103 - DNA, 402 bp, homo sapiens
ggatagagcccatttctactcacctcccagacaacctgcccttccagcccctggctgctcttggctgcctctgtctcgctgatgagaagggattaggcaggccgtggaaggggttgtcctgagatctcatacccagaactggccgaggtgatggcttcctgcaggactgggttctggtggcctcacatccacagtgattgytgtcttctccttctctctttcagggtcctgtatgggaacaagatcaccgagattgtcaagggactgtttgatgggctggtgtccctacagctgctgtgagtaggaactttgtcactgttggtgtctttggtactgtcggaaggctcccacctgaaaacgttgagccatgctctggagagttcttttgactttctgcagaca

SEQ ID NO: 104 - DNA, 649 bp, homo sapiens
aggctgggctcaagctgatcaatacccattgaagacacagggccagtctcccacacagtgtatttattgctggggtgtgagtcatattagcagcttagggagataccacaaagagaccgcttcttcctgttggggattatgtattgggctaggttgcccaggaatggagcaggatagagcccatttctactcacctcccagacaacctgcccttccagcccctggctgctcttggctgcctctgtctcgctgatgagaagggattaggcaggccgtggaaggggttgtcctgagatctcatacccagaactggccgaggtgatggcttcctgcaggactgggttctggtggcctcacatccacagtgattgctgtcttctccttctctctttcagggtcctgtatgggaacaagatcaccgagattgycaagggactgtttgatgggctggtgtccctacagctgctgtgagtaggaactttgtcactgttggtgtctttggtactgtcggaaggctcccacctgaaaacgttgagccatgctctggagagttcttttgactttctgcagacaaaagagaaaaaaatgtttgagctgtccacgcttcacctccgtttcctatttttatgaaaggagagtcagcgagcgg

SEQ ID NO: 105 - DNA, 815 bp, homo sapiens
cagagaggtgctgtgaactgcagatcactccttttgttatggctcagcataattcacggctctgtgtccatggaactttctctggttcattgtttcagcccactaatgtttgctctatgagaggatagtcaaggagctgcttgtgtttagagacccaatcgaggtgggacaatgagaattgtctccagcagaagaagcagactgacttgacgatgcgttcttgagggaagggttcttccctctcttgtgtacctggaaagccattgrgtagacttaaattctggaatcattccatgctagtcattgaatgaatggttcacccacttaaaggacggattggtaaccatgtggcaatcagataggaaagttaccaccctaatagtcctgagggaaggaatgggcaagccaccacaggtgaggtcacttgatctggtaaccaaataatagttctccctctctggtctctaggaatctcagctttcatctgtttcccttaggaaaacccagtggcttacagcccattcctagcaccctcctatgtctctggggtagaaagaggtcttgtttttcagacaggccgcccaatggtgttgctgcatgcctggttactcttgcatcgggaatcaccatgacaacccacagccattgacaagcagtgcagtcaccaacaggagagaagggaagagccactgttgcccctagttgggacttggaggactcctcctgtttccccttgagtgtttagcaagacgtggcctacagcacccattttcaagcacagagaagattctgggcagggtcagaattcatggcta

SEQ ID NO: 106 - DNA, 386 bp, homo sapiens
ctgggcagcagatcccagggccgctcccacagtagaaggatggaggctaagcacccttctctcttcctagaaacctcctgtccaaccccttcaactgcaactgccacctggcctggctcggcaagtggttgaggaagaggcggatcgtcagtgggaaccctaggtgccagaagccatttttcctcaaggagatycccatccaggatgtggccatccaggacttcacctgtgatggtaagaaggctgtgggtcaaggtctgcggggaaggccctgggaaggcaaggaagatggcgaagatgcacaatcagatactccctgagatccaattccactttgctttgggcatgcagctggagctctggagagctctgcagatctgctacta

SEQ ID NO: 107 - DNA, 562 bp, homo sapiens
ctcattagttatctcaggcagagctgccagcttacaaaacaaaattaagtttaattcaccaagaaaaaacaaaaacaaagttgcccagcatttctctaaagggcagagtgtgagaggctgttgcaagcatgcaagaccccagcaatgccatctgagcaggaggtgatttttttctccagtcagctctctattaaccctcactggcccttctctcacartctcctttcagttctaccctgggtgagtcaagccaaactgagcctcattctcacattcagtcttgcaagtgctctttgaagtagggctacagtaccagttgccctctttgtctgaccccaaatcctgtgctcatgcccattccaccagaggctcttaaatgtttaggtctcaggactcctttatgcttttcagaagcatccaggactccaagaacctgtgtttatgtgggttatagctattgatattgatcatattactaacactgagaaaatgttaaaatatgcattaattccatttaaaagtaacaattatatacccatgacatgtttatataaaaagcaca

SEQ ID NO: 108 - DNA, 600 bp, homo sapiens
attaatatctacagtcagttgactttttaaacaatatatttaggaggtacaagtacaggtttcttacatgcatatattgtgttgtggtaaagtctgggcttttagtgtacccatcacccaaatactgaacattgtgcccaataggtagtttttcagccctcagcaccctcctaccttttgtagtctccagtgtccattattctactcggtatgtccatgtgtacccattgtcatgctcccactcataagcaagaacatatagtatttgactttctgtttctgagtcatttcactgaggataatggcctccagttccatccacattgctgcaaaagacaggatttcattcttatttatggctgagtagtattcmatgtatatagatattccacattttcttttttttttttaatttttttttattttaagttccaggatagatgtgtgaatgtacaggtttgttatgtaggtatacatgtgccatggtggtttgctgcacctatcaacccatcatctaggttttaagccctagatgcattaggtatttgtcctaatgctctcccttcccttgcatcccaacccttgacaggccatggtgtg

SEQ ID NO: 109 - DNA, 708 bp, homo sapiens
tcctaccattccccctcaatcccaacctattgtcttccatcccagtctaatagttccgtgtgtgggttcactgccaggaggtgggacctgccaattttaaggaatctgcatgcatctgttcataattagagtagtgatgtttggggcaactcaatatgtaagagggagagaaaatgtttgcccgtccatctgtctgtcttttggggtgrtgggggtgatggggtgaacaccaccagcctgaccagggttttctctttcctcagcatcatttgtcccagtctggcactactactgccatgagttcatcagcggtacacgtaaccatacaacacgctagcacttgcttcttgaaatacgaattagtaggcttgccccagcatggtggctcacacctgtaatcccagcactttgggaggccgaggtgggaggattgcttgagcccaggacttcaagactagcctgggcaacatagtgaaaccctgtctctaccaaaaaattcaaaaaattagccaggcatggtaacatgcgcctgtagtcccagctacttgggaggcggaggtgggaggatcattggagcctgggaggcagaggttgcagtgagctgagatcacgccattgcattccagcctgggcaatagagccagaccctgtctcaaaagaaaaaaaaaagagaattaataggcttttagcatcatcattttagaatca

SEQ ID NO: 110 - DNA, 402 bp, homo sapiens
gggctctgagcaaaactgaagggtggcagggccaggcactggaggccctgagaatatgctaaattcaaattagtggatgctaaccttccgacctgtgccctctgcttcagaaccctccatggcaatgacatttccagcgttcctgaaggctccttcaacgacctcacatctctttcccatctgtaagtagcagtgtttctycccaatgaacattcaaaacatgaaagcatgaaagtgtcagcgacaatgtcatcactgtcagcattttggcagatgtcctttccttatgcatacagtatattatacaactatgtatccacactatgcatattgtcttgtttcccacctcagaagccttcaaaggaatcctcaattatgtaaacactgtaaatatttaataag

SEQ ID NO: 111 - DNA, 588 bp, homo sapiens
gcaaaaatgaaggcccagaaaagtgacgtaacttatccagcattccacggctaagagagactggtttctgatttcgcctcaggtctatcagattgaaaagtccacccccttcttccgcaaaccctctactccctccatccttgctgctgagctgggcatagaacattcatgcacccagagcaaagggggcagcagctactgctaggagcagtggggctctgagcaaaactgaagggtggcagggccaggcactggaggccctgagaatatgctaaattcaaattagtggatgctaaccttccgacctgtgccctctgcttcagaaccctccatggcaatgacatttccagcgttcctgaaggctccttcaacgacctcacatctctttcccatctgtaagtagcagtgtttctccccaatgaacattcaaaacatgaaagcatraaagtgtcagcgacaatgtcatcactgtcagcattttggcagatgtcctttccttatgcatacagtatattatacaactatgtatccacactatgcatattgtcttgtttcccacctcagaagccttcaaaggaatcctcaatt

SEQ ID NO: 112 - DNA, 624 bp, homo sapiens
tcccagtcacaactgggatgaaagtctagccaagtggtttgaagctgctccctaggttgctgggtttcagaaccttctctgcagagtatatcctccagtggacccttcaacagggcaagggaaccagataatcagatggccagtgatccaggaagctccctaaaggagstaggatggggttgagttgaagagtgagtcttacttgcgtaggtgagagccacgcctcagaagtggaaggggctgggatgggagttgaaacttccacaggattggaagtacactctggagatattaactttgccacagtggagacgactactccgctggccccatattggatacctccagtctagccaaagtctgaaaatgcatttccagagagccaaggatatgaaggctactggccaagctgggcagggggccctgacttcctgttctgcctcctagggcgctgggaaccaacccactccactgtgactgcagtcttcggtggctgtcggagtgggtgaaggcggggtacaaggagcctggcatcgcccgctgcagtagccctgagcccatggctgacaggctcctgctcaccaccccaacccaccgcttccagtgcaaaggtaggtgacgccc

SEQ ID NO: 113 - DNA, 402 bp, homo sapiens
tggctgaattaatgggactctagctggactggatgtgctggctgaggagagccagctgccatctgggcatggagttgggaaggggctggcgctggctgagggagggcccagagcagaggggaagggaggtatggcagtgagcgcactcaggacctgccatcagtactctggttttgctgcccagggccagtggacatcaayattgtggccaaatgcaatgcctgcctctccagcccgtgcaagaataacgggacatgcacccaggaccctgtggagctgtaccgctgtgcctgcccctacagctacaaggtatgctggaggccctgcccccccgtgttcatgcctcaggctcctccttcagccctggccctagagaggggcaccatgccctgcgtaccctcc

SEQ ID NO: 114 - DNA, 402 bp, homo sapiens
ggcagtgagcgcactcaggacctgccatcagtactctggttttgctgcccagggccagtggacatcaacattgtggccaaatgcaatgcctgcctctccagcccgtgcaagaataacgggacatgcacccaggaccctgtggagctgtaccgctgtgcctgcccctacagctacaaggtatgctggaggccctgccccccygtgttcatgcctcaggctcctccttcagccctggccctagagaggggcaccatgccctgcgtaccctcccttctccaagggacagcctggatgagtccatcgcacaggtcaccactccaaagcagcatttgccagtaacactgttctctgaactagcgggagctgccagtcagagaggcccccatatggtcttgacaagga

SEQ ID NO: 115 - DNA, 402 bp, homo sapiens
tttcccacccgtgtcttcctctctgccatcccaacccacctctctccctgacccctgactcccctgctctccacccctcacatcccaaagctgctcctgccctctgggctttgaggggcagcggtgtgagatcaacccagatgactgtgaggacaacgactgcgaaaacaatgccacctgcgtggacgggatcaacaactwcgtgtgtatctgtccgcctaactacacaggtaaggatctcatgactgtatgtatggtggggtggaggggtgtcgctagaataccattttcttaacttcctccagggactctcttcctctctccctgaggacagagactaagaccccaagactgtgatatgccaagaggggctccccaaaggcctgtttgcttctccgtgtc

SEQ ID NO: 116 - DNA, 541 bp, homo sapiens
gctgggggaatgatgacaccggccttgttggtggacattagccccagagcgaggcagccagcatgggccaggggagatagaacattgcctggagatggggttggatgaaatgaccttttaggttcctaagggtcttcctgctcaggaccccaaggcctcatgtgtccaaagtgctttctcagacctccatctggaggaaaaactaattgtatttcccacccgtgtcttcctctctgccatcccaacccacctctctccctgacccctgactcccctgctctccacccctcacatcccaaagctgctcctgccctctgggctttgaggggcagcggtgtgagatcaacccagatgactgtgaggacaacgactgcgaaaacaatgccacctgcgtggacgggatcaacaactacgtgtgtatctgyccgcctaactacacaggtaaggatctcatgactgtatgtatggtggggtggaggggtgtcgctagaataccattttcttaacttcctccagggactctcttcctctctccctgagg

SEQ ID NO: 117 - DNA, 642 bp, homo sapiens
tgcctctctttagttgatggagaagtactatataggtccttgctaccagaggttcttgaaccagcagcatcagcatcacatgggcgtttgttaggaatgctagttcccaggccccacccagactccctgaatcagaagacacattttaacaagatccctgggtgttttgtatgctcattaaagtttgagacttgctggtattgagagggctgtagcattttaaaagaaaaagaaggtcaatacatttgcctcccgacctccactgcttagtctgagagtgagaatagcttccctaattcttaataaagatctcaccagtagccttgaagtccaggcttaaaatattggattttatcttgtaagtattggccagctattattgccttggagaaagtcatatagcttaagttgytctgcaactactttttagaattcaagagacacacagatggcttcctgggccaagtttaacacagtagcagaagtatacatggtgctgtattgagcacatgcccctcaaaggcattctcaatgtgtttccttaaaagactggttgaacatgtaagtttgtacttccagtgcagcaataggttatgtatttcaaatttgccaatcaagtaaacgtgaattggtcagatctta

SEQ ID NO: 118 - DNA, 402 bp, homo sapiens
aaatgggaaatatgggacttagagaaggaaaaggtcttgccccggttagtggcagggctggaactagcccctagaactagtgtcatttcccatctcactctacctctctgctcgaggttctttggcctgagtaactgtgattgtctcctcttggccattctcctatctccctccccattctctcctgccttccagtggacscttctgtgaacaccccccacccatggtcctactgcagaccagcccatgcgaccagtacgagtgccagaacggggcccagtgcatcgtggtgcagcaggagcccacctgccgctgcccaccaggcttcgccggccccagatgcgagaagctcatcactgtcaacttcgtgggcaaagactcctacgtggaactggcctccgc

SEQ ID NO: 119 - DNA, 713 bp, homo sapiens
taactaaatcttttcttccattaaaatcttatattaaacttaagaattgtaaatacttagaagcaaaaccgccctgcagtgttgaagcaaagatcccccctccacacacactgttgtcaaggcccctgataaatcatccaacaaacccaatttgaaagccattggttaaaaccagtggttctcaaagcgtggtccccaaggcagcagcaccagcatcacctacagacatgatagaaatacacattttcagactctaccccagaactactgaatccaaaaccctaggggttggccccaacacacctgtgcttcagagatccttccaggtaattctaatgcacaagtctaggaaacaccagtttccaaaggaaaacttcctgcagaaagagcagtctgagttgggccttgaagaaagggaagaacttgtgagagcagagagaacaggtgggcaaggcatgctgggaggtcagcaaagacagaygaggagcaaagaaaagggtgttgaccagagcaagaggctcccagtggaaggtggataaagaccaggcaggttaggacagttgggcacagtggacaccagaagaaagagctcaccctggtggtctccctagagcctgggccgcctaacatctgtgtccctggagccacaggtcctggccaagtggagaggacagagagccaaggaggcagggccagggcagcctgtgaagcat

SEQ ID NO: 120 - DNA, 725 bp, homo sapiens
aagaacaagcgtgttgagtaaatagtggtccaggcagcatgcagatagagcaggattgagaaggtggtctgggaatggagtttgcttaactctatgaaataatagaaaagaatacaaataatgatagccaaatgcaatacctgaccctagactaaatcttggactggaaggaaataaatgctgtaaaggacagtattgggtccaatgcagaactggaatacagataatagactagataacagtgtggtatccatgttaaattcaccaaagttgacaactgcactgtgcttatataagagaatatctctgtccttaggaaatgcacactgaggtatctaaggataaagggctgtaatgtatgtaacttacctttaaatggttcagaaatgtgtgtgtgtatacataaaatgcacagagaaawccataagcacattggagtaatgggagaaactgggtaataagcatcttctgtactgtttttatttttgcaacttatgtaagtttaaagttatttccaaataaaaagtaaaacaaaatgtaagcaatgcaggtcaagtccacagcacagggcccagccatggaaggcccttagtgaactctccggctttctccccttctctactggccagtgtggagacagtgaatgatgggcagtttcacagtgtggagctggtgacgctaaaccagaccctgaacctagtagtggacaaaggaactccaaagag

SEQ ID NO: 121 - DNA, 404 bp, homo sapiens
gggtgacagagtgagaccttgtctttaaaacaacaacaaaacacaaaaaagtagccatcagttaggcagactctgggcctgaaatgcagcccctgcactgatagttctcaagggsttaagtgtaaaaaaagctaccaaaactgctcgttcaatcctaagattcccaagactttacccagagtccacctgcagagactagcacgggcccagaagagggtgttgttaatgggtggttcagatgtagggaggccagggaaagctctgtgccgagggcagccccagaagggacaccacttatccctggaggaggaccgtgccctgtgccccacctgctccaggtgcacccagaacggaactgggtgccctgcttccaggccagtcccaggctctcaactatagaaggt

SEQ ID NO: 122 - DNA, 402 bp, homo sapiens
accaatgccctgacttctatgccctctgcagagaatccgtgcctgggacaagtagtccgagaggtgatccgccgccagaaaggttatgcatcatgtgccacagcctccaaggtgcccatcatggaatgtcgtgggggctgtgggccccagtgctgccagcccacccgcagcaagcggcggaaatacgtcttccagtgcacrgacggctcctcgtttgtagaagaggtggagagacacttagagtgcggctgcctcgcgtgttcctaagcccctgcccgcctgcctgccacctctcggactccagcttgatggagttgggacagccatgtgggaccccctggtgattcagcatgaaggaaatgaagctggagaggaaggtaaagaagaagagaatattaagta

SEQ ID NO: 123 - DNA, 396 bp, homo sapiens
aaaagtacaagagcagacagcctccaattgggtcagcccattcatgggtttgtccactctctttgtttcctctcacttttccttttctcactacccttgccctttctttcttcttcatggtagttccttttgccttttgttctctccctctctgtcttttttttttttttttaaatccctttgccttctcccctctttttttttttttttttggcattttcccttcttctctgagattgtrgggaaatgttggaggggacttctgagggtgacagggccgggtgcctggtgcagaatgcagccacttgggggaagtaataccagatgtgacgctggtgccaacaatcagcctgaaatgtaaacgtgagctgagctccagtaataaaccccttacag

SEQ ID NO: 124 - DNA, 495 bp, homo sapiens
tcaaaacaaattctattaggtgacccgaaggctgaaaggttgactgtgtttaactggattattttacattttctcagtttgtgctttatttatacgcagtaagtttcactcaatccacctgrcttcttaccttttgtccagcttgaaaaatgaaatgagtttgggctttggcactatgtgtttcataggctcctaatctctctttgtatgttttgttggccaataatacgtaaaactatgccccaggctttcttgaagtgcatgtaaatatctgcctctctcttatctcccatggtagtaattcatccaggaaacttacttccaacaggttaggtattaaactctccctcacataaatccacattggatgtctctgatcaaattataattttcaaagtattccatcactatgtccagttaaatcgttcctaatattttcccatgactgggtgactttttaaaaaatcttgattgtgctacagaagtgttttccca

SEQ ID NO: 125 - DNA, 1612 bp, homo sapiens
gtgctcacaatgtgctgtacagatgtttyactgccagaccctactgccccctaatttgctttgtgattcctggctagttacagtccctctaggcaataccacctctttacctataccaaagcacaaaaataaggcaccttttggggggtagggaaggggtctccctccatacactgtctcctacttctttgtccatcatcaaatccttctcatactctggcttccctgttcagtctgtgtgactcccattcatcaagtgataaattcaatcattaattcaatatgtccgtagtgagtgatatattatactaagaactgtgcctgttgtatccctagagatatagcaatgcacaaaacacagtcagttactgcgtctaagtgctcactaaatgtagtgggtgaaatgaatgaaaagtgagcacaaacttaacaatctgactcggtgtatggtaaaatcggaggactcaccaggtgctatgggaacatgaagtgtaggccacaaactcttcttaattaggcagagaatgcttcctgtaggatggaagagcttgctgtggtttggctcctgggtctgcagtttacaagctgtttgactttgggcaagtcactgtacacctctgtgcatttaaaatgtgataatgatgtaaaaacttagtacagcacctatcacatagtaaatactcatatacacatattcattcactccttctttcagtaaaaatcatctattgaatacctaccgtgtgtcaggcaatgccctggaaagtgtggatggtgcacccaggtcttgaaatactaatatttccaggaaataaactacatcatctcagttctttttttttttttttttcctgcatggactacacttggaagaagtctttgaagtaacaatagtagaagttcttttttgctgtctgttgaagcagcaactcagaggattttcctaggtgtgagggaaagcccgggcagtgaggaagtagcaagtgaagctgtgcccaagttgcacgtttagggttttcatctcaccagcagctccagcctacaggagtcacccctcccaacccccatccctgtctcaaattaaggtctgcttcacatagcagggcacaacaggaatgcattgtcgtcttctgttgctgtcacaagtggtctgaaaacctttaagctgtgcaatcccccactgctgctgaatacttgaagttcttctatgaaaccttagcatgaccccgcatctctggtgctgcttcatctcgcagaaacctgtgaaccatggaggagttcttctcatcccgtgatggacagaaggctgcttcttcagagagagaagtatgagcagtgggaagctaaggaagcttacactgttgttgatgatcaaaaaatgcagcaataagcactatccttctccaggcccagaaacagagctggggtctacaggccagttgaattaaaaaggggaagccccactgttagagacattctctttctacaaccctgcccttttcttttttccttctttttttcttgagatataggtaacataagattcaccatcttaaaatatatcattcagtgctttttagtctatgccttttttgggggaccatcaccactg

SEQ ID NO: 126 - DNA, 577 bp, homo sapiens
ttgcatgaccagtgaggactagtgatgtgtggtagtccatcgttgccttgcaaggagggaggcgatgcttccatggattgtgggtctgaacttacttcagggaaattccctgaggtggggtttgagataggtttattcacacgagactgtcagtggtctcagaaggcaacggtttggaccgaacayggcaacctcatcaccttgctggttgaagcagctcctgcctttttcccacttcctagcgctgccagtctaggaaccctgggtctgggggtttatgattttgtgggaaaaggaagaaatgtgttgaattttgctttattctcttcagaggtccagggtaaaatgaggagaggggagagttggagatacttctatttattcagtgggagaatttggaagcccaggagctggagttgcaggtgagggtggagactgtgattcatgtattgtagatgtcaggcaagtgctaattaaattatcgacagtgaacctgaaatcatgctggcagtgactcagttcatggggtgtactgaattgcctaaggtacacctttctgaatgaagcgacacagtcc

SEQ ID NO: 127 - DNA, 401 bp, homo sapiens
tgagcggtgctgactgctggagagagagcaaggtccatatggcttccttatgggggacgtggaagtcaccagccctgctgcagccaacatggagacatagtcatggctctcaccctgcaggagcagctctctaggctttggggtagcctggggccagattctgttgccctgagcttcagaaacaggcgaaggaaagaaagktggtgtgtaggaaaggcctgcagatattaccagcttgtctgtggaagccacagacatctcagggtgaaaacagagaccaaaagtacctcttgcaaaatagtcattaggctgtgaacataggaagacgagaagatatagtggaaataatagtcaataacacaaccacgaagcagcaactattatttgttgaacgcttacaa

SEQ ID NO: 128 - DNA, 401 bp, homo sapiens
taacccccgctcccctgccgtgtccaagtccaattccaagtgtcttataaccacagtttgatgctgctggctcctcccccagctccacctttgcctgtgagtatatgtatctttcaaaagtcatctcttatttccagtaactccaaatacaagccgccttttagtgacaagcagatgagcgtgagctgcagtcgcctggaktgtgcaatgctgtcaccagagagaacttagtaattacatttgccaggctcaccgtccatgttggctggcaacatgaagggatcagagaattctttgaaacaatatccaagttcttggttaaaagagatacaggctgggcgcggtggctcacacctgtaatcccaacactttgggaggccgagacaggtggatcacttgag

SEQ ID NO: 129 - DNA, 526 bp, homo sapiens
tttccctacgtatgtactttattgttgttgcttcaagaaaaatacatgcaaaaatcctggcatcaacagatcccctctttcctccccttcttaccctagtcacgattacttagactttcttgtagaataagaaaagatgactaaaatgtcaaacccmaccatcatcccaaaatgtctggtccaaaattagaacaaggagaagacaatcaatcactcccaggttacgaatcatgacccagccataagcagagtctctcggtgatgtattatgtttatatctgactctccttcttgacagttggccttctgtgatcagtttcctgcattgtaaaactactccagatgtgagaacagctcaatagcagagctctcagcctaattaattcaatcacaggatggtgattaagaggtcagcggtgacatttccagagtgcaccttctgtcttcccagcagttagcttgtcctaaggctccaaagccctcaggtggctctggagccacaggagcccttgggggccttgtccca

SEQ ID NO: 130 - DNA, 587 bp, homo sapiens
actggtagaaacacaaagtagggctcccagggagttggctttgtgatggtccagctgagaaatagtgagagctggaactaaggcagtggtgatggttatctgaataattaataattactgtctactcactcccgaaaaactgcagtccctctaattgaagatatatgttctctcttagagaaatgagccccttctcaggacctcatacccacacctttccccacagttggatagacagacgcatccgtcctgctctgggaaccatagcttatagttttttggctatcctgaattccaagtcaccgctcccaagagaaaagcagtgttatcactgagaaccctgttggatgaaaacatgccctcagtagatcactttctgagtagtgcacacctttccccacagttggatagataracacatccatcctgctctgggaaccatagcttgtagttttttggctatcctgaattccgaggcaccgctcccaagagaaaagcagtgttatcactgagaaccctgtggatgaaaacatgccttccgtagatcactttctgagtggtgagatgctgaaacaaacagtggagat

SEQ ID NO: 131 - DNA, 621 bp, homo sapiens
actggattaagcagctaacctgcattattttgcttaactcggtcagtgtttcatacagcagatagtagcgctattctcatttgatagacgcagaaagtgagcctcagagaggttagataagtggcccaggctcctccgtgagtaggtaatggccggggttcatcccaggtctgactgaagagtccatattctttacatctttgcctcactgcctcttcatgtaagctctggacctgccatcataagacaaatgggaagaggtgtcctaccttcctaaaggcattttccaaagtgatttctgaagatatctgatatgggcaactttccagaattagttcagttgttaaaggtttcacggatgaataaatggtgtgggggatgggggttgagaagaggtcagaaggagagacagcgtggagaatgatttccaaggctggatcttttctttatttgattctagtaaattttaacgaggcccttaataaaatcccagtgcttagcagagcctccacatttacaagttgccagacctggggcrgaagaagggaagttggaatcctggcgctcagcttagtcctgctgacctttcacagttcaggcgagccaggcttgtaagattga

SEQ ID NO: 132 - DNA, 401 bp, homo sapiens
gaggggtggttcatgagaatgaccatatcgaagagtccttgagaacatagactttggaattatgcagatctaggttataatcctggccctaccatgtactaggtgtgtaaatttggccatttaatacctctctaactttagcctctgtattgctaaatgggaaaaatatagtatgttccatgtagtgagtagttaggagaraggaaagagatttcatgataaattaccaaggaatgggggctgggcttataagaaagggtctggcatcaatcctgtgaacaaaacactaggattagacccatcacctctaaagcaggaagaaggaagttagctgggatatgggtggtgggccagtgattgcagaggcccatcaagtaaaccaagactataatagggaaaat

SEQ ID NO: 133 - DNA, 644 bp, homo sapiens
attagcctgtttctccctcagacctcaaccttttgttgaggggaagaaacacttgtggtagaaggaaacataattaatggaaggatcatgtgcatggactatcatcttatcagtgatgataataggcctggttgcctagatctttccagtcagccgccatgttctgtcagcatagctttcataatgtcctcttcctgtcattaacaatgtctttgggtttctgggttttctgtcctcaaattcatcctgaacaccataactaggtcgttcatcctggagagatatcttggtactttgcctcccaatgtttaaaggctccctattgccaatgatgaagtcctaacaytgtatcctgacatctgcatccctacacagtatgatctccgctcatgtttatgatcttctgtcccactcttcttccgtgggaaccagaccattgagctcttgggccttcagacacctgtctgctcacctctctgctcagagttctttgcccggactgccctgcagtaatgatttttttgccctgcaataattattgcaataataaatacaataataaatgcaaaaataataaaaataatccaaacaataattattgccctgcaataattatctctccatatcctcatctctcacagaga

SEQ ID NO: 134 - DNA, 401 bp, homo sapiens
gctcttatacagcccactccagcatagctaaaatttaggtaaacactttcctcactctgagttttagaagcaagtgtttcttaacaaaatgccttcaacttcacgatattttcgaatacagcttttattccaggatttagagacacagacaccacagcaccaaaacacaccagcagagaaagctccaggtcctcactcagycctgatgcagacactttatttccctacgtatgtactttattgttgttgcttcaagaaaaatacatgcaaaaatcctggcatcaacagatcccctctttcctccccttcttaccctagtcacgattacttagactttcttgtagaataagaaaagatgactaaaatgtcaaacccaaccatcatcccaaaatgtctggtcc

SEQ ID NO: 135 - DNA, 401 bp, homo sapiens
caaaatacgagaaaaaatcaccaaagctcatgaccaggagaagatgataaggctggaggcttggcccaaggtggaatgaacgcctgtgctcagtttccaaggagaaagctgacctgccaatccatttgttgacccaaagttcatcaatgcattcaatggttctttgacttaagattaaataggacccctgtgtgaaattgsctgttagtttttaaagccttttcattttgacaggtgaaaacctcatcagaattaccctatgcaaagatgtcaggaaaaatatacaagaggaaattggaaaatgtgattgagctgagcgtacgcttcctctgccctggagttctgcgtgggcttatttatttcttgcccctttgctcttcaggcattttccatcactgagg

SEQ ID NO: 136 - DNA, 568 bp, homo sapiens
gcttgtgatgagggtctgtaccaaaggcatgaaaggggaggagagatgagggaactcaatggacatttctgtcaagtgaacccttccttagtatctccaatgcaaagtgagtcattttgatgtggccatcttgctataatcattccagtgccaaaattgtatcaacatgcaaaacactctttaaaaaaatcaccagtattgagtctaaccctcatcatccctgatgcttcaccatctccgacatcctcctcaatctttgtctcagttctgagcttccccatccctgatgctactgtacatactgcatcccctccctgtctccctgtagcatgcaaaggcatcccatcttgctaggcatcacaacagatactgataatttactaacttcatttctaggtcacatcaaaatgaccctgtgtcaaagcagtgggccaaatatcacccatccttatgttgaacttcaaaaaagcaaaagtccttcagtttttgcagacaaacctgcaaaagagagagmgctggggagacagtagtaccctgtagaatctttagccaaatgcagctttgctta

SEQ ID NO: 137 - DNA, 458 bp, homo sapiens
tacacacacgtgtgtgatttgggtgtggggtgtcctcgttaaaagggatgacgttctttttatagaaagacacttggtcatttggctccatagaaagggaagttcttcctggagtaattcgtgactgaataattaactctaaggcatgaaaccccatgtgtgagaagaagcctgctttccaaaaaaaatcaagccrgggcccagggatacccattgggaaggcccaggcagcttgcctggggtcagagtttctctttgctctgggcatcctttctgacaggttttccccaaatggggaaaaagcacttgtcaagtatattttaaaaattttttaaaagaacattttgaatagcccctgcttcaggctccctgggggttccctacttatatttttaaaagctcaggccttggcaggtctcagcttttcagttggcatgaaacggactggaaaatgcact

SEQ ID NO: 138 - DNA, 401 bp, homo sapiens
ttcttgggcccaaggggattccatgttcaccattcttcctaggctcttctagctttggactggatccctcattctgctggctctgctgcaggcttgaacctacctgtttgtatagaccacacactctactctgttttttcacttacccccagcattagcagtgccagagagaggcttggcagggtgatgagataagtgtasgtgaagcagaacaaggcgttccaagctaaaggccagtcctctctctgacatctgctccccaggaaagaagctgctttctggctcatggtcagtctgctttcgttcagataagcccagcaagtgggcctggacctgcctcttccagctggcagatgccctccttgccttcggggcacaccttagatgttatcttttccttg

SEQ ID NO: 139 - DNA, 576 bp, homo sapiens
agatacctgtgggctgggagtctggccaacacttgtcaaaagctttaaagagaaatcattctgagatccaaacaatggattcaccaacacactttcagaacttacartagtggttgccagttcctgggttctgatccttgctgcttgccatcttgcaagtcatttatattttgttcatatgtaaaatggggtggttagcctatgtaaccctatacgctcttaaaaaacaaaaagaggtatttgtgccccttggccttgactgttctcacaggggccacgagagcttctgaaggacacgttggggctgtgaggaaaggccgttggctttaggggagggttgccatttctgctgaggaggctagctgtagggaaaatgagggcctctgaaaagtgatttggggagccctcatggagtaaagggtgctgctgactcttgccgctgcaggctggtgctctgtggctgagtcagatggaggtcaaagacaccaacgttggaccaactttgaaaggtggcaagatggggctgcctagcaacacccatgtcatttctgcctgtggtttgcacgagatccaccc

SEQ ID NO: 140 - DNA, 401 bp, homo sapiens
gactcccaacccgttgtgctagaatgggaccttgggaaggaaagctttctccgagggaattgaattagccggaaatatttaagatcccattttccctcccattggcttgtatttactggtcttgatggggagtccgaggatggtacttagaggccctgcaatggaaattctaaaacaattgaccagactttcgaatgtgtsgttatgtttagatgtcttgggttgctttcccctgactttgaaaaggagcagacaaaacatgttgatttgcgaacatccttccagaacataaatcactggggtgagtgtggggttggagtctgtcatagctcactgggagatgggcccactgcctgtctttcatggtctcccctttgcactctgccctctgccccatggac

SEQ ID NO: 141 - DNA, 321 bp, homo sapiens
gactgtaggaaggggctgacccgtgcttagagtgaagggcccaggaggatgtgagggatttgggttctgttgacctacggtgtaggagaaatgcttgaagagatggggaggagctcccacaggaaattctcatgtttgtgccagtctttgttgccagaaatctcaacagaacatgaaagttcagatccccagagtggacargctaggaaattctcaggtagagttccaagagagatgtgtgtaccttccttcaggaggagtaaggggaaacgggggcaaactggggcaaattatggagaagttccttgattgctggcatat

SEQ ID NO: 142 - DNA, 666 bp, homo sapiens
ctgcagacaccgaggtgttgacggtggttggaacagtcttgctttgtctgagtaggaatgcagcctccaaaagctgactgttgatagggaagacttcagtgtattgtccttttgttaaggaaaatatgtggatgtgcttggcaaattggtccctatctgactcgcagacacagggttgattggctcaaacactagctgctgacgcgaggttaccaaaaactgcaacttattgtgcacactgtcattactttaaccaggtcttggtgaagctggtaagccaaactgactgtcttcaactttgtcatcctatctgattcttagagctgrtttttagatgattccttctgttgatgttcctgaggaaagcattctttttaccatgagatgtagtccaaagatggcttggtctgagattgctttgaaggttaatttggaaaagcctcgatgagcttataacattcaagaagaacgttctgctgatcatgcttattttctttgatccttgttctcagtttgctacatatttcaaactaagttttagaattcctgaatgtccacaccacccaaggtaataactaacatttatagtgcattttaaaagtaccaagcattgtgctagcctttatattcattacaaatttacattcatcacaaatttaattccct

SEQ ID NO: 143 - DNA, 400 bp, homo sapiens
ttaattgctaccctccttcattaaggggcaattaattttgtgccttggtttaaaacggcggtaattataaggtgaagacaaaaagcccatggttaaacataatcaggctggatgtaaaaggtgctccctggcagattaaggaaggtgggagggaaggagcatgcatcgtcccaggcaggcaacattttccgtcttgctayttcttttctcaattcgtaactgctgttgcagggtagggcttaggacaaagcccgtctttttctgcccaggttgcaggactttgcgtcttgcgggtcttgggttttgaggtcttggccattgggcattctcctgccatagaagtcagcccgaaggcctggactgagctcagtggcccagggccttgggtggtggacatggc

SEQ ID NO: 144 - DNA, 401 bp, homo sapiens
gctcttcatctagcaggttaggagccggcacctagagattggaggcaactaggatgctgctgttgcttacaacacctctgtgcgagttagaaaaaggtgatcccccccccactctgggctgaccctgctctgggatcacagggcttgggatgaatcctaagtgaatgcctcttaagcaggctccctagtgctttggtggarggagaggagcatagagctgagtggtccccagtctgttgtcccagcagggtctctggccactggccatatgccagcaatcaaggaacttctccataatttgccccaatttgcccccatttccccttgttcctcctgaaggatgcatgcagctcagacttcagccatcagccatcagagcatccctgacagtttgaggcctt

SEQ ID NO: 145 - DNA, 552 bp, homo sapiens
atttagatggtggcgctgataacccaaattgcctaacccattaacctttctgtgtactaggagtgggaagaggggaaaccgcagatttgaagccacactaccatatcccacctccaccacataggtccataattttgtttttctaagcctcagtattcactgcgtaaatggatatagcaacagccagagttgtggagacagtcaaggataatggtgtattgtaagtatcagtctattctctgactcatattaagggctcatctggcccttcttcattttgttccttcttcccatgactaagacacagacccaagctttccatcattgccrtcattgttcattgtctatggtattcctcagagctctgcaggaagtgggatccacagacccaccttctgcctttgaagtatttgccatctaaaatgaacatacatttatggaacacacagtcaggagccaagaacagccaaacagttgtgaaaagagcaaagggtattttcatcatatgcatgtcaaagggagttgcattttagaggaagattttttttttaa

SEQ ID NO: 146 - DNA, 577 bp, homo sapiens
ttgcatgaccagtgaggactagtgatgtgtggtagtccatcgttgccttgcaaggagggaggcgatgcttccatggattgtgggtctgaacttacttcaggkaaattccctgaggtggggtttgagataggtttattcacacgagactgtcagtggtctcagaaggcaacggtttggaccgaacacggcaacctcatcaccttgctggttgaagcagctcctgcctttttcccacttcctagcgctgccagtctaggaaccctgggtctgggggtttatgattttgtgggaaaaggaagaaatgtgttgaattttgctttattctcttcagaggtccagggtaaaatgaggagaggggagagttggagatacttctatttattcagtgggagaatttggaagcccaggagctggagttgcaggtgagggtggagactgtgattcatgtattgtagatgtcaggcaagtgctaattaaattatcgacagtgaacctgaaatcatgctggcagtgactcagttcatggggtgtactgaattgcctaaggtacacctttctgaatgaagcgacacagtcc

SEQ ID NO: 147 - DNA, 489 bp, homo sapiens
atctacggaaggcatgttttcatccacagggttctcagtgataacactgcttttctcttgggagcggtgcctcggaattcaggatagccaaaaaactacaagctatggttcccagagcaggatggatgtgtctatctatccaactgtggggaaaggtgtgcactactcagaaagtgatctactgagggcatgttttcatccaacagggttctcagtgataacactgcttttctcttgggagcggtgacttggaattcaggatagccaaaaaactataagctatggttcccagagcaggacggatgcgtctgtctatccaactgtggggaaaggtgtgggtatgaggtcctgagaaggggctcatttctctaagagagaacatatatcttcaattagagggactgcagtttttcggragtgagtagacagtaattattaattattcagataaccatcaccactgccttagttccagctctcactatttct

SEQ ID NO: 148 - DNA, 409 bp, homo sapiens
tcggtagacacaggaaggcaggtctctctctttttctgttctgcagcaggagctcaaggctgcaaggatgagtgatgggagctttgcagcccatcccctgcaggtgcaacccttgccccgcaggtaattaccaggattagtgaatcaaccaggctctcttctgtttgcagcctcctcaatgccaacaagatcaactgcctgcrggtgaacacgtttcaggacctgcagaacctcaacttgctctccctgtatgacaacaagctgcagaccatcagcaaggggctcttcgcccctctgcagtccatccagacactgtgagtacactgcctcgggtgccagtgggtgcccaagcagcaggagaccccaaatgcccatcatgaaaaacacccaaatgagggcagcacgagca

SEQ ID NO: 149 - DNA, 753 bp, homo sapiens
actccagaaccatatccagaaaggtctcttctaaacatccctccctgatttgggtcgtgcttattagcgaaagagaatgagcttgcttcctgagtcttcctatactttgccctgacccacacttccattcagacctggtctctgaaaaattactagccccaattataatgaacagtttccccatgagaagtaatttaattttgcaaattgttgtccaagtcataagggttggaggtgtctggagactttgggagcrgcagttgttctctaatcctgtggccctgtggggatactgtgtacatcagggtaggaatttcttcaagctgaaccaatgtctcctctttctgcctttttccttattttgtctctttcttgcatcactgctattcttccttaaagacaggcaaggggttggtggattccaggctgttaccaccccgcttctggaggatgtggtgcgtgtgacagcttgggcaaggcacagagcccaggctgtgtgtgtcacactccgttcccaccgacaaacactgctgctcgcctccctgtccaaatctgataccacgtatgttctcccgatcctgtgctgttgctctggaaaccaaggaagcagcaggatctggagtaggttcatggccgagtcaaccttaaaagtctcccagacgtttcagcaacttccggcaggaaaaatgtacctgcacccctgcccagtgagaagtttttgactgatagctctctccccgtggaaaagttgcc

SEQ ID NO: 150 - DNA, 930 bp, homo sapiens
accgttgctggcagcagccatcctggacctggtgctggcctctgatcccaacccagccaagtccattcaaacatgggagcttggctccctacctgtcccacacccctggtcatccaaatgtgacaagtgttcctcctgggaagtggctgtaggacagggatgtataataaaattgtgttgctgtaatttccacctcckacccccacccccccgtctattaaagcttgtctgtgatcacgtaccaagtgtcgttgttctgagctgcccgcgaaaggggaggagggctccaggggcaggagcaggcaagatgccagatgacatcagctcttccaaggctggtttcagccgaggttgagttttatggcccttcttcaaatcctctgggatctcttctgtctgaactcaccccaaagagaagaagcaacagcctattgcagtcggtcctctattactaagtatttctggcagtgacaaatatgcactgagattgaaattgacttttaaagctctggaaaagttaaaaatactttggggtagttatgagcattaggcataacaaatggctctgagaaaccctgagtagtttcggtaatgaaatatgaagtgatggagatggcatttcgggctggctctgactggggaacgaactttttcggttatgtacatacgccgttattaacatttctggctcccactcgtataaaatatcacattccgacccccttgttattacaaaccagggcaataacaaaaacagcagggggaaaaatgctggaaagaacacattagtccatcgaatctaattgcaaaatcatttcattaaaatgggtcagcggctccattgcagaggtccaccagttataatctaactatactactgagagcgattcctgctaactacaggctgctctcacttgatgtaaaatgaaa

SEQ ID NO: 151 - DNA, 402 bp, homo sapiens
ctcccaggctccgaggattaccgcagcaggttcagcagcgagtgcttcatggacctcgtgtgccccgagaagtgtcgctgtgagggcacgattgtggactgctccaaccagaagctggtccgcatcccaagccacctccctgaatatgtcaccgacctgtaagtccaacctcggcgtgaactccctactcctccccacacrccagtcacccggagccagcgtgggcagggtctcctggcggtgaccccttcctggctcagtcatgtggtgtttgttggctgtctttcacatactggtctgaaggtagatacccaggcatctcctgtggacagcttgcttgcaaataaagacagttcattccttcattctacacatattttctgaacacctactgtgagccgg

SEQ ID NO: 152 - DNA, 573 bp, homo sapiens
actactgtgagtactggttgagtatcccttatctgaaatgcatgggatcaggagtgtttcagattccagatttttttggattttggaatgtttacatgtacacaatgagatgtcatgaggctgggatgcaagtctaaacacgaaattcacttgtgtttcatgtacaccatatacacagcctgaaggtagctatgtgatatttttaataattttatgcatgaaacaaagttcaagtacattgaaccttcagaaagcaaaggtgtcaggtgtggaattttctacttgtggcatcatatcagcactcagaaagtttcggacattctggttagggrtgcttacttataatgagagtggactgtaccacctcgtttttttctcattacccatgctcccacccatcagttccctgtagacaaatatgacagaggccttctaggccctgggcagcatctggatctcactggtgctactcagatcgctttcctccctccgtccctgcctgcagccaccaccttggtcatggctccagcgaatgctgtgtaaccgggtgcagtggagagcacgttggggggc

SEQ ID NO: 153 - DNA, 821 bp, homo sapiens
ctcctcttaaatcagtgctagtgagatctctaataagacagaaaatagtttgagagtcactttttaactctgtcagtcccccagagcattgaaaagacaattacacagaaaaaacttcaaatcccatccagcctgtttttttaaattgatacataacaattatacatatttatgggacacgtgatattttgatacatgcatgcaatgtacagtgatcaaacaggatatttaggatatccgtcacttctaacatctatcatttctttgtgttggaggtatttcaaatcttttcttctagctattttgaaatacatattgttgttaactatagtcaccctactgtgactgtcaccctatctaacactagaacttattccttttagctcccccattaaccaacctctcttcatctccctcaaaccttcccagcctctggtaaccatccttctactgtctccctccatgagatcaacttttttagctcccacatatgagtaggagcgtatgatatttgccttgctgtgcctggctcatttcacttaacacagtgacctccagtgccattcatgttgctgcaaatgacaggttttcattctttttatggccaaatagtcttccattgtgtatatatacaccacattttcttgatccattcatccactgaccatacagtctgtttcacaaaggtagcttcacctgtatagggccagggtccctgctccctgggccagatgctgaagaccaargttcagggagccccagactgagctccttccaccatccagtcctcagtctcaggggccccagagagtccccagcag

SEQ ID NO: 154 - DNA, 663 bp, homo sapiens
ggagtcagagtcatcagacattctggagccttggatgggaaagaatttagcatgctgaacacctccagcatgcacactcacacacacacaccacacacacacccaacatagtcacccactctcgtgtatacacgtatatagatttataccagraacttgctgaaggaggcacacaaacagacatttacccacaaacataagcataaggacctttataaaaatgatatatgcagacacgtgcaacatgcacataaacatatatacaaacaggcacagacacacaagcacacacatacatacaagctgatgtctacaaccacgtcttgattctctcttctcttcccagaaatatgtgtgcacaccctagcagccacacaatatgcgtgtgtatacacacatatgcatgacatgtgcttccaagaaagcatgcacaaacaataatgtacatacacatttacacacagccccagtggggctccagtccctgctatcacaggacaaacctgatcaacatggctggactgagcttagaattggcaaaagcatctcacctatacacacacacacaccaccgtggcaccatttgggacagaaaagatcatgcctgtgctctctcatccccacccctctacctgtaagatgctgaggatgtaacttgatcgg

SEQ ID NO: 155 - DNA, 734 bp, homo sapiens
ctctcactttctgctatccaactgaatctcattcttttttgttttgagatggcgtttcactcttgtggcccatgctggagtgcaaagacgcgatcttggctcactgcaaccctcgcctccgggttcaagcgattatcctgcctcaacctccccaagtagctgggattataggcatgtgccaccacacccagctaattttgtatttttagtagagacggggtttcatcatgttagtcagcctggtctcgaactcccgacctcaaggtatccacccctctgcgcctttcaaagtgctgggattacaggctgaatctcgttctttaaaattcattgctcatctctccacctctaggaagccctccctgactatgctggtcttatttattagaaagacttcttctagctctagcttccccagcaaactattattgagcatcagccatactccaactccgagacyggtgctttaactgccttccccaccatgctatgagctacttgtgagcggggaattgtatttttattttttattagcagggtttagtacagcgctaaaatattttttaatggaaaaaatgcatgaatgggaagttgtgctgtaagagcagatgtcaattttatggaattcattacctcagaggtatttgaggcggaggatgtgaacatcagcttcccaaatgtctagatgtgcgtttcccaaagcgattcattttaatgggtgttcagcaacaaaa

SEQ ID NO: 156 - DNA, 402 bp, homo sapiens
aggaaagatcatcctttccctctttctccaaggagagttagacccttggacaggtgctccatgtactaggacctgagttctctgactgctgcagtgttttgtctggtctgccacaaccagaccgtgcacctgtgacaaaaaagacctccctgtccttaaggccagagaacacagtagccctcagtgaccacttgttgacasgtggatggttaattcactcttctctgctctgtttcccagacgcctagaacagaactccatcaaagccatccctgcaggagccttcacccagtacaagaaactgaagcgaatgtgagtttcccctgtggagaaatgggcccaaatgttttcaatttccagggttgtttgcaatgtgtagtgggcaacctgtccaggtgacgg

SEQ ID NO: 157 - DNA, 402 bp, homo sapiens
ttccacaatgaaagcatatatcaaaacattgtgttgcacaccaaatatgtatacatttttaaaagactagttgagtacagtagtgaaaaaggaggaaagagtagaacaaggagtttgatctgtaactgactgtgaacaatccattgagagaactcactacctttgaaccagcctaaatatgcagtttttataataataaaraaaaagacaaagtgaccaaggtcaattcccagctaaactgtctatcacttctccaattcccactctccagcacctccaaaccgtggggcatctcacctcatactgtagggagagatgggtccagaagtctagttgtggactgaaaaccagtttgccctcccagagctaaagcagagggtttccgtgctggccacatagctt

SEQ ID NO: 158 - DNA, 402 bp, homo sapiens
acagatccttcgtgtttgtctggaatgctttgcataggcagccatgctgagggcaagtgagattaggataatccagagtatttgcttgttaagacccttaaacaaaaccggagcgcggaagaaaagcccggtgtaagctgacgagtttgtgagtgcaatctgcggatttgtcggaggtgatttcgccagctaaagggataractagacagctgtgccgaagagccttaacctgtgaaatatcgttcaaagtacaggctttggaggcagggaggggaggaagtagaggcctcagcaaaggttgtggcatggttcttttgaaatctattagaagaaggaaggaaacaggctcagagagattcccactgcatgtgcttaagaggctggagtgtctggcttcgctg

SEQ ID NO: 159 - DNA, 402 bp, homo sapiens
tcactgctcaaaagctcctttcaggtcagggaggaaaagtcactggggaggtgaaatgactctggactttctgggagaaaaatgagcagctgctgaggcatgaggcaagaagatgatgcctacaggaaccctggcttgtggttggttgggtgaagccggttcctgtttcatctgtgtcgttaattgcttggtaatgaaacrtaaggccctaatttgactgggctcaattttccacctacaaagtgatggttcacgtgttcacagcctcgtgtcccgatgaagatgccacgggtgagtattctttgaaaaccaagaagagtgatgtaaatgtggtgcactttatcatgaggtagttgaactgaaggctctttaagctccttctcttgcactatgagtaaatga

SEQ ID NO: 160 - DNA, 402 bp, homo sapiens
catcttgcttcctacacaggcgactgaatgacaatgaggtatctgttctggaggccactggcatcttcaagaagttgcccaacctgcggaaaatgtaagtcaacttcaggaacttggcagcagcctctgttctctagccagagcctgtgttctagactagaggaaccaggggaccggcctctcccccagcctctgctccaytccctcccagccttctcctcagccccgctgtggcctctgttaggaagcaagacatgtagacacagaccaaagtgatgcttcatggtttcagttgagtgttatacagagcgagcattccacaccatccctgacccctccctggaccctctgctcaccccacccctacacgccatccaacacctaccccagggctggtgggtg

SEQ ID NO: 161 - DNA, 402 bp, homo sapiens
aaaatgtaagtcaacttcaggaacttggcagcagcctctgttctctagccagagcctgtgttctagactagaggaaccaggggaccggcctctcccccagcctctgctccactccctcccagccttctcctcagccccgctgtggcctctgttaggaagcaagacatgtagacacagaccaaagtgatgcttcatgctttyagttgagtgttatacagagcgagcattccacaccatccctgacccctccctggaccctctgctcaccccacccctacacgccatccaacacctaccccagggctggtgggtgggactcaggtaaggactagcaatggggcacgggtatctaaggtatatgctatttggcaatttttgtgtggtgacagttaaatgtctgtt

SEQ ID NO: 162 - DNA, 406 bp, homo sapiens
gtggcctctgttaggaagcaagacatgtagacacagaccaaagtgatgcttcatggtttcagttgagtgttatacagagcgagcattccacaccatccctgacccctccctggaccctctgctcaccccacccctacacgccatccaacacctaccccagggctggtgggtgggactcaggtaaggactagcaatggggcacrggtatctaaggtatatgctatttggcaatttttgtgtggtgacagttaaatgtctgttttcaaatggaatcaaaagacccctgcatcagtgatacacatcagaatgaacatgccagcagcttcccacagtgggtttcctccaggagtccgtgggtctgaccatgccttggcctaggcaagggcccacttgcctatgttggctt

SEQ ID NO: 163 - DNA, 381 bp, homo sapiens
tgagcttctttaagaataacattttcaattctttacctggcatttcaaggaattctttttgattgggatctgttgctggacaattgtggtcctttggtagcatcatatttccctgctgtttcatgtttcctgtgtcattacttggatttctgaacatctggtgtagcagtcacttgttctaattgtttgaaattgcttttgtaggggagaattttctcygaggatatatatatatatatatatatatgttgttgattaagatactttgggtttgattttgagtgcctgtggtagtgtgatctttgtatgaattcctcggcagggcataggatcagtggtctctataatcacatcctcagtgacttagggtaccattattag

SEQ ID NO: 164 - DNA, 625 bp, homo sapiens
tgtctgcttaggaccagaagccagtctgcaaagggaaagtgggagatcttgcagaatgaaagagcattacccttgggaaagtaggagaccttctctgaaaagctgaaagaacaccatctctctgtgggatggattcctataaactcctgaaaccagcctctagataaggatttctcaacttcggaactatggacattggggttaattattcgttgttgggaggctgtcatagacattataggatgtttaacaacatctgtggcctctacccactagatgccagtaatacttaccccagtattgacaaccagaaatgtcttcagaccttgccaaatgtcactgagggagcacaagtgcccccagttaagaatcactgctctaaagcaatggtcctcacyatcagctgattagaggaatcacctgagcagatttttttcaagctactgatgctcaagcccatgctagaccaattaaatcagaatacctgggcatggaactcaggcatcagaggatttaaaagctccccaggtgattctaatgtgcagctaacattgccacagctctggatgtttatccccgcagggaagctcgaggttgcagctggcagaggactgcacccccacca

SEQ ID NO: 165 - DNA, 402 bp, homo sapiens
gagccagctgccatctgggcatggagttgggaaggggctggcgctggctgagggagggcccagagcagaggggaagggaggtatggcagtgagcgcactcaggacctgccatcagtactctggttttgctgcccagggccagtggacatcaacattgtggccaaatgcaatgcctgcctctccagcccgtgcaagaataaygggacatgcacccaggaccctgtggagctgtaccgctgtgcctgcccctacagctacaaggtatgctggaggccctgcccccccgtgttcatgcctcaggctcctccttcagccctggccctagagaggggcaccatgccctgcgtaccctcccttctccaagggacagcctggatgagtccatcgcacaggtcaccactc

SEQ ID NO: 166 - DNA, 649 bp, homo sapiens
gagctcaccagcatgatggagtggacacacagagagagcttagtgatgtggagtccaggacgcccgaacctaagcaaggacaccccagaggcaatcacgaatccctcatgtctcaccttctgaggagctcttctcaagggttaaactagtctccaaattgcctttgatgttacagcagttgtaattggttttatgcctatgagggtgaaaaacaagaggtgaccctagctccacgtcttcatcacaagagccgccccacctgccctggttcttgttccccaggcccctggatcaactggtgtactgaggccaccaagcccacgtttagagaggagagrttgaagagttaaagcaatagcagaactaaccagatttttagggtagttctaattcagtcatatcctggtgggttcaacgtggcctgatgcggaaccccacaggtagacgcagaagagtgaatggggaaaaggtcattttctggtacaagaggaaggcagtggaaaaaaatcgacagcagtcctgaaacctaggtcagggtgtgctcactctcctagagcggggttggtgtcctggtacagggtgttaggatattcaagcacgatgttgcccacttcagagaacccagagtttaatgcaagtcgcagtgtgt

SEQ ID NO: 167 - DNA, 590 bp, homo sapiens
ctgcttggatgacctccttccctggtctcatgctcccacccctacccgctccctgaacactgtcctcaggttccttcctgggcctggcaacatctctggaaagaaaatctcacccaaagcacaatcgtcctatccccagcacctttcctcatgactcacgccaaccttggcctctattcctacccctgtctggccagggctgagttaattagctctgccaaacagtggtacccaaaaagaaggacagtgagagccagaggagggcagggtattatctgccaaccttgaccctttggtctcataagtatcctgttagtactttggaccccaaatggatgtggcggccctgcgtggcacagcagggaaagagtgcaggatccaaggactggtatctccccaggaacacagtcttggcaattttctgggcatgactgtaggttagcggggtggcaagrtgggggcggggctatagaaagaactaagtaggagaaaaggaaaatggaaagtggacctaggaagcagtagagcttagttctaactctagctctgccactatcgtcctacctgtagatctgcaggatcctggctgc

SEQ ID NO: 168 - DNA, 401 bp, homo sapiens
atcacgccactgcactccagccttggccacagagcgagattcggtctcaaaaaaaaaaagaaaagacagattcagagaggtttagtgacttgttcaagatcattgtcttattcatcctttcctgaatacctgctaccggttagttgctgtgcttaactctggagggggaaagaaagcaaacagtgaatgagacacaattgytgccctcagggagctcttggtctagaaggggaaataagtaaataagcaactacaacacaaggcgatacctgaaagaagagccatggggatacaagtgagaggcacctaacccagtcttagccacccaaaaggctttctgaaaggaaggttaataatcagcactgacattcatcaaaccgtgactatgtgctgcacaaagg

SEQ ID NO: 169 - DNA, 1118 bp, homo sapiens
ccaggtgcttctccctcttttgctcctcagggcaaggactgcactgtgcccatcaacacctgcatccagaacccctgtcagcatggaggcacctgccacctgagtgacagccacaaggatgggttcaggtaacagttcacccctggcctccctcactgtattagtttgctctcacactgctaataaagacatacccaagactgggtaatttataaaggaaagaagtttaaaggactcacagttcagcatggctgggaagcctcacaatcatggcagaaggcaaaggaaaagcaaacatcttaaatggcgggaggcaaaagagagcttgtgcaggggaactcccatttataaaaccgtcagctctggtgagatttattcactaccatgagaacagtatgggagaaactgcccccgtgattcaattatctccacctggccccacccttgacacttggggattattataattcaaggtgagatttgggtagggacccagccaaaccatatcactcaccttggagggctccctgggcaggctaaagaagcagagataygaccagcgagggcgtgcccagtgcccgtgctgtgctggccctgtatgagaatgatctcaaggctcttcgcaccctgtaagggaagtacaatttatccccactgtgcagataaggaagttcaagcatcagagggacaaatcctctgcctagagttacattaagcattggcacagggatttgaaaccaggtcccaacctcgtgcttcctccaagggaggtgtctgctgctggctaaagtcagagaaggattgggtgaaggcttaaagactgcccgtctggcacttccaccatgcttttctgagttataaaataagtggcatttattatatgctcactatgccaggtaccaactagtcaagtattttctcatttaaatccctacagaccctatccagtaggtaggtattatcttcattgaacagatggggaagctgagacacagaaatggacttgctctaggtcgtatctcctgatgctcattcctggatcttccaggcccacctccagccctctttccttcctgacattaacatttcaagaagaaaagggaatagaagtcacttag

SEQ ID NO: 170 - DNA, 599 bp, homo sapiens
taggtattttgtagcactgcagacttcaaaggcaatgtgtctagagaccagaacttcaaattcctttcatacttccttccctgaaaaatccaaggggcttacttttctgtaacaggtgaactgggctgctaagccttgtctgtgtctctgaagcctcctctgacctcctgggggaggttatgggtcccccttgtgcttccacaaagtttgcccttctggtcacacctacaagtctgtattgtaattgcctgcttatttgtagatcttcccaaataggctgtgggtaggaaaggacccagtcactgttgtgtccccagtgcctggcacagtacctgccacacaggaggtgctcagtaaataagtgtggaatgaaaaaacaaatgaataagcatggcccaaagtsagggccaggcatcctgtgctctcagctgcacctgcccctgcccctgaaagatcaagtaaaacagccaaatggtgatgctaggacagtgtccaggaggacacctggaatcttcccgtggtcactgccaaagaaaccaaggcagaggtgcaggaggatacacaaggagtgagaacacaggactcctgacgtccatgcc

SEQ ID NO: 171 - DNA, 608 bp, homo sapiens
gccaccaccactctcatatatgcacctctggaactacttggcaccaaccaaagacctgaaaaagtattttagtcactcacattcagccctgcctcagaccccaagcatcatcatcatcatcatcatcatcatcatcatcatcatcgctattatttatggagctgccattacatgctaggtgtcttacatakataaccattaactaattccccatagggtagttcatattatttccatttcataagtggtaaaaacaaggctcagagagaactagtcatttcctcaaggaacacagcagccaacttagaatgtgcactcccatctgtgtgcccctagaacgcatgttttgagaggggctagccaagtggtcctgcatagaggctcccagcactaactttgggctggatgcctgggttcagctgcttgctccccatttcacttactgctgtgcgatcttggccatattacctcactttctaagtctgtctttcctgtctgtaaaaatagtgtaataacaatcacaccaatctcatagggttgttgtgaacatgatatgcgatcatgaatataaaacacttagcatgaggcctggaacggaaaatgtgctc

SEQ ID NO: 172 - DNA, 663 bp, homo sapiens
ggagtcagagtcatcagacattctggagccttggatgggaaagaatttagcatgctgaacacctccagcatrcacactcacacacacacaccacacacacacccaacatagtcacccactctcgtgtatacacgtatatagatttataccagaaacttgctgaaggaggcacacaaacagacatttacccacaaacataagcataaggacctttataaaaatgatatatgcagacacgtgcaacatgcacataaacatatatacaaacaggcacagacacacaagcacacacatacatacaagctgatgtctacaaccacgtcttgattctctcttctcttcccagaaatatgtgtgcacaccctagcagccacacaatatgcgtgtgtatacacacatatgcatgacatgtgcttccaagaaagcatgcacaaacaataatgtacatacacatttacacacagccccagtggggctccagtccctgctatcacaggacaaacctgatcaacatggctggactgagcttagaattggcaaaagcatctcacctatacacacacacacaccaccgtggcaccatttgggacagaaaagatcatgcctgtgctctctcatccccacccctctacctgtaagatgctgaggatgtaacttgatcgg

SEQ ID NO: 173 - DNA, 121 bp, homo sapiens
aggagagtcagcgagcgggcagaggaagaccgaggtcagtgtgcataaacccaaatgatayagccgagggccctggcccaggcatgaagatactaagcacagggtctggggatagagatta

SEQ ID NO: 174 - DNA, 516 bp, homo sapiens
tcttcttggtttggatccgttgctggtgagctagtgtgattttctgggggtgttaaagaaccttgttttgtcatatcaccagagttggttttctggtttcttctcattagggtagggtctgtcagagggaaggtctagggtttaaggctgttgttcagattctcttgtcccacagagtgttcccttgatgtagtactccccctcttttcctagggrtgtggcttcctgagagctgagctgtagttcagctgattgttatctctcttcttgatctagccacccagcaattctaccaggctcgggctggtactgggggttgtctgcacagagtcctgtgatgtcagccatctggatctctcagccgtggataccagcacctgttctggtggcaatggcagggaagtgaaatggactctctggagggccttagctttggttttttaatgcactatttttgtactgattggcctcctgctgggaggcactttcaagagagcctcagctatggtagtatgg

SEQ ID NO: 175 - DNA, 402 bp, homo sapiens
aagggacactgacgatcatgggaagggctgagtgaccatgcctgcatggcatgaagcctagtatgagggtccctgagcccagctttgtccttagtcattgctgtctctgtggttgtaggcatctggaagacaaccaggtcagcgtcatcgagagaggcgccttccaggacctgaagcagctagagcgactgtaagtacagwacagcctcctttcttaaagtatttatttacatttagtgttttttgttttgttttgttttgtttttgtaaattggccttataaccttgttaaaaaaggtctccagtgtttaaatagaatgtttgctattatacttaaggcacattagatgcatgttaaagaaacactgagatccacttacactccttttctgtaaaagttgc

SEQ ID NO: 176 - DNA, 581 bp, homo sapiens
gaacttagttccagtgatagggaaagtggaaggctatgaacaaataaatcaccatgcccagcttctaggatgacagcgatgtcaggttgactaaccatgcttccctttcatagagatgataatttcttctccagcctgtgcattaaaagagcaatcaggacaaaagttatctgtcttgtagcttaatggagaggaggggaggagagcatcagaaagggtcagggcccttgctgaacacccacagctgtgcagacaggtagcaaaatttgaaatgggcattgatggactagaggagcaaggaatattaggtttcattgctgaatattgaacactttcatcaatccttaagtctgtgagtgataagaaacttcccaagtgcttgtctgtcraaaagtctaagacattcagaggtacaggaaaaagcaatttagattttattttccatctttacttggtagttaattttgacccataagtgtggctccatgcaagaagtacagactgggccaattggccactgccttggtatttgtatgccatggaatcttagctggcaaattgttactagaagtgacagctaa

SEQ ID NO: 177 - DNA, 683 bp, homo sapiens
aagaggggtcagccccatttgtatgacatgatctgagagttgggggaggggaaacttcaacagaaaaatttgttacctaaagaagggaccacagaaggcaggcagttacatataaaagagttctgctatgtgcataatgaatggtttattccatacaatatccttaaggttagccgggcacgctcaagggatatcgttaatcatcagaattgccgccttctggacaagcaacatcccttcagtccaagccagtctggattaaatagaccgtaattgtaacccacaaaaatctgacctgaatttgctctccattgcagtgacctggacagaaataatatcaccaggatcaccaagatggacttcgctgggctcaagaacctccgagtcttgtaagtagttgatggctctcaagtgtgttttcatttttagctcttcagcctcacaaaaaaatgttccactgcccctgacatcacactcccaagccctggacaacaggaattcaccattctgcagcagaaagcccctcgttagcrtacccacatgcttacaggtatcacattctgtgtctagatgctgctggctgagctagatcgatggaagaacttagttccagtgatagggaaagtggaaggctatgaacaaataaatcaccatgcccagcttctaggatgacagcgatgtca

SEQ ID NO: 178 - DNA, 304 bp, homo sapiens
gacctccagcaagtcgcttcacttctctgagctgttttcagacgaccccttggaagatcgtggacttaagtaaagaatatgagtagagtgctcagctcagtgcaaaaattaaaaaaaaaaaagtgtcaggagccttatccgtccttggatcttaacagtgaatgagtttcagtgtttytttccaggggccctgctggccgagcccctttccttccctggttccttctctctccctcctctactgcctcctccctccaggctctcggtcgctccagcaaagttcccaacttagtcgacatgacgc

SEQ ID NO: 179 - DNA, 606 bp, homo sapiens
  misc_feature 560, 561, 563: n = A,T,C or G
ttagtctggctggttggaaacagaaaacctccgctgactgtggtggccacatgaagggtagtatctcacacagggaaatatacacaggttgacgagaaagtttgagatggggtttcttgcaggaatgggtgagtagtttgcttttgagaaacacaggttgaggagaaagtttgagatggggtttcctgcaggaatgggcgagtagtttgcttttgaaaagcctatggaaaagtaaaggggaaaattcaaaagtgtccagggacttttacgcaactctaaaaatgacaccacagagtgtaaagccacctctggcccttggacatagaaagttctaaacaatagcctgacctcctagtgatttacccagtcttctccaaggagggtaattgctccatggggtggctaccgccttctgcagatgccccagaatcagctgaggaagtggacagagccacatsttcagcattggaagcccggagtcctggctctggttatttcactaatagctaggtgaccctacataaatgcccgcctttctctgaaactcagcttccttgttnncngtaaaatacaagagttgaactatatttgggttctcaaagtatg

SEQ ID NO: 180 - DNA, 606 bp, homo sapiens
  misc_feature 560, 561, 563: n = A,T,C or G
ttagtctggctggttggaaacagaaaacctccgctgactgtggtggccacatgaagggtagtatctcacacagggaaatatacacaggttgacgagaaagtttgagatggggtttcttgcaggaatgggtgagtagtttgcttttgagaaacacaggttgaggagaaagtttgagatggggtttcctgcaggaatgggcgagtagtttgcttttgaaaagcctatggaaaagtaaaggggaaaattcaaaagtgtccagggacttttacgcaactctaaaaatgacaccacagagtgtaaagccacctctggcccttggacatagaaagttctaaacaatagcctgacctcctagtgatttacccagtcttctccaaggagggtaattsctccatggggtggctaccgccttctgcagatgccccagaatcagctgaggaagtggacagagccacatgttcagcattggaagcccggagtcctggctctggttatttcactaatagctaggtgaccctacataaatgcccgcctttctctgaaactcagcttccttgttnncngtaaaatacaagagttgaactatatttgggttctcaaagtatg

SEQ ID NO: 181 - DNA, 606 bp, homo sapiens
  misc_feature 560, 561, 563: n = A,T,C or G
ttagtctggctggttggaaacagaaaacctccgctgactgtggtggccacatgaagggtagtatctcacacagggaaatatacacaggttgacgagaaagtttgagatggggtttcttgcaggaatgggtgagtagtttgcttttgagaaacacaggttgaggagaaagtttgagatggggtttcctgcaggaatgggcgagtagtttgcttttgaaaagcctatggaaaagtaaaggggaaaattcaaaagtgtccagggacttttaygcaactctaaaaatgacaccacagagtgtaaagccacctctggcccttggacatagaaagttctaaacaatagcctgacctcctagtgatttacccagtcttctccaaggagggtaattgctccatggggtggctaccgccttctgcagatgccccagaatcagctgaggaagtggacagagccacatgttcagcattggaagcccggagtcctggctctggttatttcactaatagctaggtgaccctacataaatgcccgcctttctctgaaactcagcttccttgttnncngtaaaatacaagagttgaactatatttgggttctcaaagtatg

SEQ ID NO: 182 - DNA, 557 bp, homo sapiens
aactatatgtccttgttttattttattttattttttttggggggtggtttccatagggtttaccacatatgtctttaactaaccatagtctactttcaaataatatcataccattttacctacagcataagaaccttacaacagtatacagtatacttccattactgttctcccattctttgtgctgttcttttcatatacttkaacacctattataacccccttggtacattattactttactttaaacagttatctttttaaacacctttattgtgaggtacaatttacatgtaacacaagtcactcattttaagatgagtttgatgagttttgggaaatttttatagttgtgtgactatcaccacaatctagccttagaacacttgtgttgccccaaagagtgcactcatgcctgttagcagtttccactatctgtcccaccatccccttggcctcaggcaaccactgatctgctctctgtctccatagttttgccttttctttacatttcaaataaatggaattctatggcctgtagtcttgtctttgtgtct

SEQ ID NO: 183 - DNA, 1001 bp, homo sapiens
atagagtcttccaatccatgagcacagttacatcaatcattttataagctcattttagtttcatcaaaattttgtcatattcagcatcaaatcttgcacatatttagttttcccctaaatatttcatgtcctttaatgctattgtaaatgatactgttttgtaatttcgatttccagttattcactcccaatatctaagacggcaatttattttcatacattgaccgtatcttcttatatacgacaactttactaaactcaattagtagaatcttttcaaaaagttttatttggataattttaatgagcacaagagccgttttgttacatggagatattgtatagtggtgaagtctgggcttatagtataaccattacttgaacaatgtacccattaatatctcatccctcttcctgcttgcaccctggacccttctgagtctccagtgcctactatttcatactctatgtccacaagtactcattatttagcttccaccrgtaagtgagaacatgcagtatttaactttctgtttctgagttgtttctttaagataatggtctccagttccatccttgtcactgcagaaaatacatgctttcattctttttgtatagctgtcacctagcagattctttgggatttcctatgcagataactgtgttgtttgtaaatagagatttatgtcttcctttcaaatctgtatgtctttttactttttctcatattattacactgggtagaacctgaagtatgtgttgaaaatgagtggtgaaattagacattcttgcctttatttctgattttaggagggaagccatcattcttgcattattatgtacattagctgcagggtgttctatagatattctttattcagtttcaggatgcttcccttttcctttagctttccgagaatttttatcatgaatacatgtgaaatgttgtcaaatgcttttttcgcacctattgagatgatagtatgctttttatttttttt

SEQ ID NO: 184 - DNA, 1001 bp, homo sapiens
ttattatcagctatgaaaatgcatttacaagtcacactgctatatgtcagcaccctgatacctcctaggccatgagaaataaacagtaacatttttgagacttcttcttcaacccagtcaacaaacattccattgcaaagtaagaaaagagggcagggcatgaatttaaaagcaaattgttccaccattgtctggagtctggtgtctgcttctttctgaaaagattattgactcttttctgtttcttttattaaatgtcatattcatttaagtgttatgcaagttgccagtgtgtatggagcatagtaatagatgtttttcataaatgcgttttatctttatttatcagtgacacaaaatggcaagtgataatcaaagcaatgacttaggaatcctgaccaagacaatctttccatggaaaaggatcatttttaagaaaataataatagtggctacaatttttaaaatgagaaaactgaggtttaggtgagttttgtttgyttttgtaaggttgattgaaatatttacagatgggaaaatgtgtcctttttaagagtatactgtgatgagttttgaaaagtgtatacagttgtgtaattaaaatcataactaagctatagaacatttccatcacgcaaatgtccttatgtctttttatagcctattatctctcctctccaccactctctagcaagcaaaaatctagttttgggtctgctttttgccttttcagaatgcaatataaatgtaagagaatttgtaacttttgtgccttctttcactaacagaatgtttttcagattcatctatgttgttgcctgtatcaatgctttatgtttactgctaagttatgttccattaaattcatgtaccacaaattggctgtccactcaccaactgatgaccatttgagttgtttcttttttttttgagaaggaatctctccctgtcgcctaggctggagtgcaatggcatgatcttggctcatgcaatttctgcct

SEQ ID NO: 185 - DNA, 1001 bp, homo sapiens
ggaaaagacaaaccacccataattcataattctctcacctctcctggagttctgctttatgttaatttttatagtagtttcctcataattagatatcacatctccatccaatattacatattgtttccttcatttaatattaagcattaagcattttccataaagttaatctccaaaaccatcatttcaattgttgcataatttttcatttgtccatttatgtgaataaatgtactatatgctacacaacaatttattattggacatttaaattacttcaaatgttattaaaatatattattatgaatgttttgagcatatttaagcataattgatgaattcataattcagctgtctaccatttaatgaccaattattggctgccagttatggtgcactgtgcaaatgacttttcatacatctcatttgatcttaatagcacacagagtaatgtctatgttgaagtagtttgtcacatataaaaatgtaaacataatatgraaacactcttgaactgattgatcatttttgctaaatattaatatgtagccacatttgttttagaattctttaaaaagtaaaatattttacatagagttgaaactcctcatcctattgccttcccaccttccccgtaggcgactactatccagaacttagtgtttacatctctattttctaattattttgctcatatgaatgtgccaataaagaacacaaggaattaatgtgcttcttttaagatttatataaatggcataatatactgtacatatttttgaacttcgttgttcacttgtgtcttaaaattatgttgatacatgatgattttgttaatttaaacagctgcatagttttccgctgtatgtataatcacaatttatttatgtgttaatttgatgaacatttaggctttccctataatttgcgtttgcaagcaatgctataatgaacatctttttacatgtctcctttgtgcacatgtgtgcacttacatctag

SEQ ID NO: 186 - DNA, 1001 bp, homo sapiens
aattgaaaagtcagtgaaagatacacacatctatgtttacccctttatggcaaagataaaactgaaatgcagtaggaattgaagtgtattttcaaaaattaatttttcatcagttggatacccatatgagaaaactgaattttaatttatactttgtattataaaagaaagtccaaatgtattatagatctacatataaaaattaagttttctaaaggaaaacacagaagaatatctgtaggcgaagatttcttagatagaataatcataaaatactaacaataaaagaaagttgggctacattaaaattaagaatttctatttgtcaaaagacaacactttgagagtgaaaagacaagttatacggtgagagaagatatttatagtacatatatctcacaattgattagtattcataatacctaaggaactcatacacattgataataaagatataaaactcaataaaaaaatgggcaaaagattcaagtaggcacttcrgaaaagaagcttttcaaaggcccattagcatttgaaaagatgtttaacatcattagtcattagagaaatgaaatagggagactgtcctattacctgagtgggcccatttacaagggtccttaaaaatggtagcgggaaccagaagagagaacaagatgaaagtgagaagaattcagaccaaaactgctggaggaagtcagccaaaaagtcagtgaacgaaaaaaactcaggtggtctctagaagctggaaaaggcaaagaaacacattgtcccctagagcctccagaaaggagggtggccccgataacacctttatcttaacctagtgagattcttattggacttctaatctacagaactgtaagatagtaaatttgtggtgttttaagccactaaatttgtggcaacttgtcacaccagcaatggaaaaatccttctatgacccagcaattccactcctaaatatatacccaacagaaaggcaaagatatatgcaccaa

SEQ ID NO: 187 - DNA, 1001 bp, homo sapiens
acttagagctgtgcccctggacctcataggaaacctattagagcactttgtgacatgtgtctgagactcagaactaaagcagagaagtgtttctagtgatggaaactgcatggggcaaacagggacatatgggtcagaggaaaagagaacagtaaaaagatgtcaaatctttttgtctgcagagataatgaggttttggagagaagaaagaaggcctttgcctgtggctctctggtgctctttaaataacaaccaagaaataccttattctttggagtgcctctaataaaaattgttcctctgcatctgcgatgatctctcagaatgaaaccttacaccttgtagtagaaacttagtgcaatggttttcatgacttgtaattttcctgtgccaaatgaaaagcttcctgttcagtggtcctgaattgagacaccatttctagtctgcaggaggcttgtaggatgtcttcccctggctgctagtgagctgtggctcatgttrtgatttttttttaagcctccagcatttttcgctttcactctgattgcatcgggcgaagtggcttcagccagtctagggtgaccagtggtgtaccctggatcccgctagcagtcaggagtaccagagagatacaagtcagtgaggtaaaccaatccagctgcaagtgcagtgtctgtgtgggctccaggggagcatggaaatgtcacctactcctgtggcatctgcaccacaccgtagcaatgtgggaaaagcatgagcaataaattacttgccaatgaactccagacgtctccagccaagtaagcatttcctgggactctaaggatggcgtccaagataaaaacagagaaaacacataaaatacgcagagcagacaaaggactacatcaaaaaatataaaacttcctcataaatcaataaaggaaaggccaagtcatgatagaaaactagataatttacagaagaaacctggaaagccaataataatggaaaaaagctta

SEQ ID NO: 188 - DNA, 1001 bp, homo sapiens
aatgtcatcaggatccaatttctctctctcttcagcccctagtcatgctttctctatgtaatttcatcttcagacagattttatccttatcacgtggtccccagattcccctggctgacattccacagctccaggtccagcagaaggtgagactgtgctctcccaccactcaaccaagtcccgtgatgtgtctcgctagaccaagcttaatcacttccattctcctgaaccaatagctgtggccagtacctgctcaattgtttgactggcaaagcctgggccacgagtccacttctggagccaggggtgaggaactgtcaccagcagtagatgctgattaggaaaagaataccctcagtcacactctgcttattcatcttcattcattcattttgcagagatgaactgaggacttatttgtgctagaaactagagacagaatcccagataacttctgctcttccttcacaatgtcactcaggagtcatcagttctatgatmaatttgttcatttccgccccctcggcagagtcagttattccctccttgatgctcttgctcttcgcaggattatgttgctatctccccatctttctccctaacttactgtgagctcctggaggacaggtattgtatcttatttatcttggcctccccagataccaacagcaggcacagacaaagcattcacaaacctttgttgaataaatatgcgaatgatgagttaattatttaattagttaattaatgcatatgctcctaatcctgcagggatttttacaaactatcaaggaaaataaatccgtaaatagctggaacacagtgtgatccacggagtgacagccacatgagcaaaggctggtgagtgcaatggaaggtagcatgtgttcaacctgaagacagaattcttaaagttgttaaagatatcctttgctatttcaaatctaaatcatgctccctatgacttctattcacctattcttagttcttcattcttcaac

SEQ ID NO: 189 - DNA, 1001 bp, homo sapiens
ggtactgtttaccctaaaacaccttcctactgatactccaaatcctaatagatattttttgagttacttatcacattcttgatgtctggaagacagacaataggtggaaatcagtaaaagatgaacaatgaggttggaggaaggggaccaaacatttattcagtatttactatgtgtcaaaactgaaactgaatagaataggtgatatcacccctactctacagatgaagaaaccaataccctgaataggtttcccaaggaatcctgagttacagagcaatggagtcaagattgaacaagttctaactcaaagtccttatgtttgtcattatttgatgccgtgaggttagtactggagggttagatgaggaacaggacaccaggcagagagatgagaattggattctgggagtattcgagtgtgggataactgagcctaatcaagcaggtagccagagtgggcacagaatttcaggaccaggcaccagctactagacagargctccatcatgacctaaccttggcattattgcaagattttacaagcttcttatttatgggaagagccacactctgaatttggctatcttgaaggttacaagtcaaagtgaatggcagtaacctgctttatggaaaccctgagtaggtgtagagcaagacaagtttatccctggaatcccttccatgatcttatttgaagaagtattcttaggtaacaataccccaatggttcccaacccatgggagcttctgaatagttagtacacctgggacccatccaagaccaactgagttgggtttctaggtgtggggccctggcatctgtgctctctgaagttctccagacctgatgagcagccagggttgaaaccacagccttgggttaaatgagctttctgtaatatatgttatttctctgagaggtaggacagagttacaatgctgcagaattctaaggggcagagggagaagggggaaaagcttctggtcctaaaagttga

SEQ ID NO: 190 - DNA, 1001 bp, homo sapiens
gacacttgcagactccttgaggtgcatcattattggaaagattagactacctcaaagtgcagtgtcctttctgatggttataggaatctttatggacctacatccttttgccctattaaatcgcctagaacattgcttctcaaaccttaacatgtacaaaaatcacctgatggttgtgttaaaatatgaatcctgatttggtagagttactgcatttcccatcatcttttaggtgatgatgagactgctggtctgcggtctaccttttgagaagtcagaggactaaagtcaaagtccttagactgcctccagttctactgttcagatccagtcccattgatttgagggctggagtgttctcatataaaaagaggtagaagatgaaaagtaactgagatttgaaatcatatctaggccactgaaccctgaactaggcagtgaagccagacggaccacgccaaatcaaagccctggaagtttcatgtagtcattccagacatrcccctgaggccaccagagccatttgttccaaaatcacttggaagacagaaagcaatttgaaatcatgcctgagccccaggcacccagggctgcccagtggggtcagctgcccctgattgaatggcactccatttctgtcccccagaaacactgggatccccagcctgtttcttcacgaaggttctctttttgtattgcttcagagtattgcacaggatattagccacttccttctctataattcatccttccactttgccatctggaatatttctcttttacaagtgcctaagttgttacagtttgaggcagttgaatcctaactttgccatttggggtaatttattgtttttaatgctttcttccaaaaattcagattctgtggtttgaaacagaatccagccaagatttttgcttcctagttggacatctggttgtctgtcctttccaggtcttctctgggtttatttttcagcttcccgcaagtgactatcagctca

SEQ ID NO: 191 - DNA, 1001 bp, homo sapiens
aaagctccttatctttaaaatgttgcatcaaatattgtaaacaaaactaggtgtgccaaacaaaacatgttcgaatgtcattttttaaaaactcttggctaccagctggagctcaaacaaacaatgacatgcagtgaatgctcttatcctttccaggtctctaagaaaacccaaagtccctgcctccaaccttcctccccgacagatacccacactacatcccctcgctcctactggctccccagacaatgagctggacaatatgacccaagaatttcactgccaaggtattgctgccaaggttttcgagtttcaagtccctagtttagagtgagtcatctcaaattcaattagtggagagttcctctgggttcagtcaccagtggcagagggagaaatgactcagacggtggagcatgcagtgcctaatgggtccagcatgtgggggcttttgagattgttgggcacggtgctcatggtgcccgaggggagtacaaagcygggctggaggttgcaacatgctctcagctcaactcattgttggctcttttggactgaaagatatttgagatatttgtatttgacctcaaacatatggtggatctagcacctcaaggatatatattattataagcctgttggctcctattccagcctcgtttccttctgccagcctgaactgcacattttgcattctggcattaccaaactattgtaattccccaggctctttcttgcctctataccttagtggtgccattgtttccctggaatacctatatgtgcttctgacaaactcctttttgtgctttaaagctccaaacagacatcactacttttgggaaaataactctaacacccccccatttgttaaacttgtattcttcctttgtccatctataatttgaacttacttttcacattgtataaaaaccatttgcttatctgcttgtctgcctagttaaggagaagcctttaaggtcagaaagcttgtaatattc

SEQ ID NO: 192 - DNA, 1001 bp, homo sapiens
attaaataaaccaacctatgcaaaatacttgaaagggttcctggcataaagtaagcaatatataagcatataaatataaatctaattaccattttcaacatgttccagacacaatgcatatattggtcttatgaagtagatatttattttctcataaatgaaacaaagactcgggaagttatacaacaaaaataaatcctgataagaatagagaagagaaggttcctattgccagcctggggaagtccttgaaagctttagggaagagcaggcagatgagtacagatgaaaggaaggggagcattgaaacatgaatagatggagaaaaagaaaaacattccatgcagtgtcgtgggtgccaggtctcctgggagaggacattagatgcccagacttggaccagcaatgacattccattcactatgcattgaatgagcatccattaaatacataccatgacacaattatgatgggaaacgtaagataatacatgtaaccccygcctcagtatgtctactatatgttctgccaaaatagaatgagtaggtgaggtggaggttgctgaccttcatgcccacccttttattgcattattttctaataaattcctgagcactgagcagatgaaatatgccaaagaaataatactttgaggtccattcctctgttaccaaaactgtcatcagagtttgtctcctcattggtagcttcagaataggctttgcaaacacaaatgcctatagggccaaaaaggcccttgaatgttactacacaagtgaaacattctggatataagtgcaggggcatcagaatgtaaaaatcggggtgaagactctggaaacctagggagcacaccacctgtaccagggatatccattcttcacttgcagtgggttattgccaggtctttcaatgctttaacagaatcagaaatgtggtatgtaatgtaaaagctccttatctttaaaatgttgcatcaaatattgtaaacaaaactaggt

SEQ ID NO: 193 - DNA, 1001 bp, homo sapiens
gttgaggatttttgcatttatgttaatcagggatattggtctgtagttttctttttttgttacgtccttctctggttttggtaacagggtggatttactggccttgtggaataagttagggataaatccctcctcttcaattttttggaacagcttcaggaggattagtcttagttccttgtacatttgatggagtttgactgtgaatccatctggtcctgggcttttcatcagctttggacaagaacaaattttccctttttataagaacaccagtcatattagattaagacccacccttatgacctcactttaacttatctgcaatgaccctatttccaaataagtttcattcacaaatactggagttaaggactctaataatatattttgtgggggacacaattctacccataatacagcccatgccttgctcccaacttctggttaacatcagacctgcacaaactttccttggttaatagatttcttgagccttcygttttctgactctaatttaggtctgtgtgccttccaggcacattcctcagtacttcctacctggagaagaataagggactactgcagcttcctgcaggagttctctccagcaaagaaaggcctcaaagacatcttcctagagattattgtcagacagctattgcatggagaagcagcagagctgggaggaccctcaggggtcatatggccattttacagaggaatggactgggtcccaaaacaattaagtcattcttgtccaggtatgtgtcagaaccaggctgccaactcagtcttctcatttgaagtctggtacttttctcattccacttaagacaagctcagctctgtcctagacattataagggaatcaaaaaaatatataatatttcattgagttaaaaatgcacatatttcacatttttgaatctccaaaatagagatgctatttccatttgatggcatgtctaatcggcagcattttctcttttttagtagaa

SEQ ID NO: 194 - DNA, 1001 bp, homo sapiens
tgagagaggagtgcagtggcgtgatctcggctcactgcaaactgtgcctctcaagttcaaccagttctcatgcctcagcctcccaagcaaccaagattacaggtgtgcaccaccatgcccggctaatttttgtatttttagtagagatgggttttcaccatgttggccaggctggtctcaaactactgcctcaggtgacctgccctcttcggcctcccaaagtgctgggattacaggtgtgagctaccgtgcccagccctcttgccacttctatttcaacatcgtactggaggctctagccagtacaactagacaagaaagttaaataaaaaacatacacagtgtaaaggaagaaataaaactagctctctttcagatgatataatcttgtaaacagatcttgtagaatcctaaagaacctactaaaattattagaataacatgacaagtttagtaagattgtagggtataagagcaatatacaaaaatcaattgtatttrcatgtactagcaatgaacaatctgaaaatgaaattaagaaaatttcatttataatagcaggaaaaagaacaagtaagctaaaatacttaggaattaatttaacaaaataagtgaacaactgtactttggaaatgacaagacattgttgaaagaaattaaagaccaaataagtataaagacacatcacattctcagatcagaaggcttaaaattgtggagatgacaaaactgctcaaagtgattcatatattcaatgcagtcactgttaaaactccagcttgcatcttttcagaaatggacaagctgattctaaaattcatatgaaaatgcaagggaacaagaattgccaaagaatcttgaaaaataacaatgttggagagctcacactttctgattttaaaacttactacaaagctacgttaatcagaagtgtggcactggcataaggatagatttataactcaagggaatagaattgagagccctgtagtaaaactctc

SEQ ID NO: 195 - DNA, 1001 bp, homo sapiens
ctttttatgtgttttaaattttccataataaacagttttaaaatatatatataagagtattgacatacctatgaatgcaagatcggattaacatctgaatatcaattaatgaaatatacatatcaatagaataaaaaacaaagaacataaggtcatctcaatagatgcagaaaaagcatttgacaaaaatctaacaccacttcatgataaaaacacctaacaaactagcaatagaaggggactttctcaacctgatgagggccatttacaaaaagctcacagccaacatcatacatacttgtggaagacttagtgctttccctctaaatattaacaacaagacaaagatgtcttctcttgcctttttttttttttttttttttggagacagggtcttgctctctcaccctgtgagagaggagtgcagtggcgtgatctcggctcactgcaaactgtgcctctcaagttcaaccagttctcatgcctcagcctcccaagcarccaagattacaggtgtgcaccaccatgcccggctaatttttgtatttttagtagagatgggttttcaccatgttggccaggctggtctcaaactactgcctcaggtgacctgccctcttcggcctcccaaagtgctgggattacaggtgtgagctaccgtgcccagccctcttgccacttctatttcaacatcgtactggaggctctagccagtacaactagacaagaaagttaaataaaaaacatacacagtgtaaaggaagaaataaaactagctctctttcagatgatataatcttgtaaacagatcttgtagaatcctaaagaacctactaaaattattagaataacatgacaagtttagtaagattgtagggtataagagcaatatacaaaaatcaattgtatttccatgtactagcaatgaacaatctgaaaatgaaattaagaaaatttcatttataatagcaggaaaaagaacaagtaagctaaaatactta

SEQ ID NO: 196 - DNA, 516 bp, homo sapiens; identical to SEQ ID NO: 174

SEQ ID NO: 197 - DNA, 1001 bp, homo sapiens
tttactaggttataagaacataaattataaaaccagagaataattattgagttaattatacaaactatgcattaggtactcacttatcctattaaactcttttagcaaatgtaaaggtttaggatcattatgttcatttacagacagaaagagagagacctcaaaaattacatgatttacagagctagaaagtgtaggatttggtattctaactcagatttatctgactcctaaagttgagggtcagccttgctgcattctcttgcctccacacgaagctgtcagtgactgccaagagtttatatttttactcatcccttctagagggcatttgcattttaataaagttcttcaacactttagctcaacggttatcaaagtacagtctaggggtctcctgggccctaaaaacctttcaggaagtctgcaaagtcgaaactatgttcttagtaatacttagatgttatttgccatcttcactgtgttaacgtttgcactaawggtgaaaaagcaatagtggatctaactgccagcctaacaaatcagggtagtggcactcagctgttattgcattcatcaacatcatcctcataggggggaaaaagtccattttcctaagaatatttatggtgaagcagtaaatattattaattttattgtatctctacccttgcatatacttttaaatatattctgcaacaaaatgggacgcaaacataaagcacttctgctgcataacaaattttcaagggaaagcacttgtgtgattcagctgtgagttgagctagccactattgtcatggaacaccattttttttcatgaaaaaatgactgacaggccaactggttattcagacttgggtatttggcagacattttctcaaaaatgaacaaagtgagcctgtcgtttcaaggaaagcgactgacagcatttgatgtcaatgataaaatgtgagtgttcaagcaaaaattagaattttgaaaaatttatatctgccaca

SEQ ID NO: 198 - DNA, 1001 bp, homo sapiens
cagcagatacgtggataaggaatgtgtggtatatatactcagtggaatgttattcagccataaaaataatgaaattctgtcatttgcagcaacttgggtgaggctggggacattatgttgagtgaaataaaacagacacagaaagacaaatattagatattctcactcatatgtgggaactaaaaaagttgagctcataaaagcagagagtagaattgtggttaccagagtctgggaagggtactgggggatagggaaaggttggttaacaaggacaaaattactgttagagcaataagttctagtgttctatagcacagcagggtgactatagttaacaataatttattgtttacttcatagtaattagaagggagaattttgaatgtgcccaacacaaagaaatgataaaattgatttcatcattacacgtcatatacatgtatcaaatatcacatgtgccccataaatatgtacagttattgtttgtcagttaaacayaaatttttaaaaggtgtttataaatgtcctaaattaaagacacagccttatcctacgggattttctgaagctggcttccccattttctgttctccatagttataggacaggctggcaggggcaagactcgctggggccaaagtagacgtgtatgttcttgatgcgagctttatatcccaaacatattgatttttattcgggagtttacctaaaccatttttagagttatttctatgtgcacaagctaatgaatccaaggattcctgcctgctttgtaaaatagcatttttagctactgctgatctgacccctggaggtctagttttctgggactgtctgaacctatctctgttcactctatcaacgcccagcatgctattacacacctctctttagttctttcctacaagaaagaatttcttcacaagtacagatacgtgtttaaagagccactcacacatctcccttctcatctctttggtgttctaggagaaatggaa

SEQ ID NO: 199 - DNA, 1001 bp, homo sapiens
tggattcctattgcaagtagacaactggaagaacttcctctcaggacactgaggagagttttcaaatgaaattgtgatgtcattttcccagaaatattttaggtttaaatgaaaggacacgtgcctgaaatgggtagacaagttatttcctcatggggtaggagagaatcactgagctgcatcccattgtaatggctgggattgaagttcctctttggaggtagaggagaaccaagtgctgagaagaggcaacacagcttcaaagacctgccccaaatccatcaaaaacagttcttgctctgtcccctaggctggagtgcagtggcaggattatagctcactgcagcctcgacttcccaggctcaagcaatcctcccttgggcggggccccaagtagcctcctgagtagcagggaccagagttggtaaaatatgcagatgtggaacctcaggttatggagggcctactgtacgtgtgtgtgtgtgtgtgtgtgtgtgtatrtatagttaacatttgcagtgcacagatattttcatccccttccctgaagatgaggaggtgaagatggctacacaacagtctcatggcaggttagctggtctaaggagaaggtgctagaaggaagaggccttctgaagcttgtgactcaagcactccccactgctctgcttgtatggtgttaataaatgctatatttcgctcacaaaatatatacagaataagagctatgtttcatataaaaatgactcttcttctacagtctcactatgtgttcctgtgagtacaaggagtgagggcttggctctctttaccaaggcactgtctgtctccagctgtattcacagcacacatgtaggtgcacttatgtacagatacgccctgtctcactgacacaggacccagggtcagttttcattttggtgaatgataatttctagattaggtcattttcatatggagtttgcctattggggcatcctaatctgaggaaaggcctttgt

SEQ ID NO: 200 - DNA, 1001 bp, homo sapiens
ttcttgatggaggactccgcttggtctgagattcactggacagcacgtggattgctctcagaccccgtcccatcagttatggctagatctgggtggggcccaacagcattcaacatagcgacccagatttgccttctcaatacaaccatgggtagggaggtccctctaggagacatgtctcatataaattattttttcctttgctctttcccataggatttgataataaagtagtgcaactctaaagggaccaggagtccagagaggtacgtttgagtccctctgtcttattatgtctgatgtccagtttgcagctttttaaattctgccacatatgagttctattagaatagactctatgaatcctggaatttaaccttggcctttgttgtccatgactcagagaatacactcatgtatctcagtgcttgaaaggagaatgggttataaattctggaccccttactttagagatgaggaaacagagactttagaaatggrttgattaaaaattttgtaagtatgtaaaggcagagacctacgaaactcacctctcagtactccaaatacagcactcctcacttcactgcactgcttccctgggaggaagaggcaacttaggagccagtgaaggtggacacgcggagctcaaaagatagcaggtgggctcatgttgacaccaccaacccccatgctcaccacctgagaattcaacagccagatttctgctgccaggttggctgctggcatctgcatccagctgacctgcttctaagattgaatgcaagtttcactcagcccaactctctacccatcccagtgaccagcattggctcagaatcttccattccagcccttgtttctcaaagggaaagaggtcagcatcttggcacatctctttaaagtcatgttcacatgctgcagtaggctctctggggagctggataatattctgagcttagtgacttcagcctgtataaactcatggagtatttacttat

SEQ ID NO: 201 - DNA, 1001 bp, homo sapiens
caaattgcttcaaataaaagaatgctgttttaaagatagatatggctctgttgagggctagaaatcttgggcaccaatatctgtcttggagagtgtcttctctccatctatccaatatcgtctctttttaaaaaaaaaaaaaaaccgtttttttggccgggcgcagtgaatcacacctgtaatcccagcactttggaaggccgaggcaggtggatcacaaggtcaggagttcaagaccagtctggcaaagatggtgaaaccccgtctctaccaaaaatacaaaaattagctgggtgtggtggcgggcgcctgtaatcccagctacttgggaggctgaggcaggagaatcacttgaacccaggaggtggaggttgcagtgagccgagatcatgccactgcactccagcctgggtgacagagtgagactctgtctcaaaaaatttttttttaattttctgagtatatagtaggtatatatattaggttggtgcaaaaataagrgtagtttttaccatgaaaagtaattgcaaaaaccacagttacttttgcaccaacctaatatttatggtgattccttctctatggtcctgttgctatgccacaaaccactcccagatggagtggctcaaaagaacagtgatcactatttctcatgcctctgtgggttgactgcactctctagttctttctcaaggtgtttcttgtagttgcagtcaggtggcagctggggctagattgatctgaaggctgaacctagctagacttgcaaggtggcccactcacatggctgctggctaggagtttagctgaggctgccaattccagtaactgtgtcctctccatgtggcttggatttctcttggcgtggcagctgggttcgaagggaacatcccaagatacccaggtggaagctgcaaggctttttacggcctatttttgaaaaccatgctctgttatttccaccatgttcgaccagttgtagggtcagtcccaattcaaag

SEQ ID NO: 202 - DNA, 1001 bp, homo sapiens
cacctccttatggcatacttgcaccaaggtggtggaggtgcttgggaaaccatctgattgcatggcctctctcagtcttttccctcctgtttttctttttctgggaaagactgcatgagacccatatggcagggcaagtgggagccataatgtgggttcatgaaaggagcacggataatggtcacttcacagcctcactttcattactgagaaggtggatggaggagaattaccatgcatctcattaaatcaatattttatttcctccctgctcccagctgccctcccagctttgatctctttgcctctggggcagtgctggacaggtgactttcatgatgcaaatcagggtcggcgggctgtctgcccaggctttgatctcctacctaagagaaggctggcaaggaacgccatgggccccagccccaggttctctgtaaccttaggcgaggtggagcctgtggaaggactgttcttttgtctttgtgaacagcaggagcygttaaactacctgagttccagtaatgtacaccatgtgaagtgttggaggagctagacaggagagggcatcttgtttaacagatatctatttatcttattcaaatataggttaactagctaagtttagaacaaggccaaggcattgagaaataatagattctccacctgtcatactgggggcttcttttcttgactctgataaaagctatgcatactctccctttccccaatatttgtttttccttcttttgccatcgctattgatgcctagccatggttctggggtagagaggaagaaggacatgacatagcggaagtgagagttcttccctaagcacagtacaggctgaccaggaaggggaggtaaaagcaattctcagacgttgcatttctggagcttacagggagaaaaaggaagatagagggaggagaggcagggagagacataaatgtcttcatctcctgatgaccaggaatctgatgagtaacgcttggtgctg

SEQ ID NO: 203 - DNA, 2001 bp, homo sapiens
ttgcccgcccacactccgcagccagggccaaaagggctttggctcctcttacacagaaactgtagctgcttctgtggtgagccacagctccccagggcccggcctctgatgagggtcagtgacgtcatcttcggcaggagtttcagacggagaattcccccaagacctcgaaatcaatatgtctctgccccgctttgcctttccagccagaaaatatgcccattacttgacttttgtctgctgctttaagatctcagcttgttaccaagcttgacatgccttcttattctcatctccgcccaccttcaacccattcattgaagcccagctcgagtatggtaaacttcagagcacttcagcaatagaaattctcaaagttagcaaagtcattttccgtttgtcctctgtggcttcttcagttactagagaagaagcatcgggggctctagagtacccttcccccatgtctttttgagcagatgctcttttatctgttttagattttgagtttctgcatgtaattatttttgaactgggactgaaacagttcagaacacacctccttatggcatacttgcaccaaggtggtggaggtgcttgggaaaccatctgattgcatggcctctctcagtcttttccctcctgtttttctttttctgggaaagactgcatgagacccatatggcagggcaagtgggagccataatgtgggttcatgaaaggagcacggataatggtcacttcacagcctcactttcattactgagaaggtggatggaggagaattaccatgcatctcattaaatcaatattttatttcctccctgctcccagctgccctcccagctttgatctctttgcctctggggcagtgctggacaggtgactttcatgatgcaaatcagggtcggcgggctgtctgcccaggctttgatctcctacctaagagaaggctggcaaggaacgccatgggccccagccccaggttctctgtaaccttrggcgaggtggagcctgtggaaggactgttcttttgtctttgtgaacagcaggagccgttaaactacctgagttccagtaatgtacaccatgtgaagtgttggaggagctagacaggagagggcatcttgtttaacagatatctatttatcttattcaaatataggttaactagctaagtttagaacaaggccaaggcattgagaaataatagattctccacctgtcatactgggggcttcttttcttgactctgataaaagctatgcatactctccctttccccaatatttgtttttccttcttttgccatcgctattgatgcctagccatggttctggggtagagaggaagaaggacatgacatagcggaagtgagagttcttccctaagcacagtacaggctgaccaggaaggggaggtaaaagcaattctcagacgttgcatttctggagcttacagggagaaaaaggaagatagagggaggagaggcagggagagacataaatgtcttcatctcctgatgaccaggaatctgatgagtaacgcttggtgctggggatctgatgctcttctgcttcatatttcagactctcagagtagataattttacaggctgcctttattagtgtgaatagagttaggttcatgaacataaattcttacattgtttttatatttcttattacattacagaattgtaaaaaccttgttagtgcaagtaattattcatagactagcttccggaaacctctgtcctagactctctactcactaggtttctatttctgtcttgttccagttggactttagttggtttgtttatgtaataaggaaaggagatcccctcaaattgcttcaaataaaagaatgctgttttaaagatagatatggctctgttgagggctagaaatcttgggcaccaatatctgtcttggagagtgtcttctctccatctatccaatatcgtctctttttaaaaaaaaaaaaaaaccgtttttt

SEQ ID NO: 204 - DNA, 2001 bp, homo sapiens
ttaacattttcaccacttaatccttaaatcctccgttgcccgcccacactccgcagccagggccaaaagggctttggctcctcttacacagaaactgtagctgcttctgtggtgagccacagctccccagggcccggcctctgatgagggtcagtgacgtcatcttcggcaggagtttcagacggagaattcccccaagacctcgaaatcaatatgtctctgccccgctttgcctttccagccagaaaatatgcccattacttgacttttgtctgctgctttaagatctcagcttgttaccaagcttgacatgccttcttattctcatctccgcccaccttcaacccattcattgaagcccagctcgagtatggtaaacttcagagcacttcagcaatagaaattctcaaagttagcaaagtcattttccgtttgtcctctgtggcttcttcagttactagagaagaagcatcgggggctctagagtacccttcccccatgtctttttgagcagatgctcttttatctgttttagattttgagtttctgcatgtaattatttttgaactgggactgaaacagttcagaacacacctccttatggcatacttgcaccaaggtggtggaggtgcttgggaaaccatctgattgcatggcctctctcagtcttttccctcctgtttttctttttctgggaaagactgcatgagacccatatggcagggcaagtgggagccataatgtgggttcatgaaaggagcacggataatggtcacttcacagcctcactttcattactgagaaggtggatggaggagaattaccatgcatctcattaaatcaatattttatttcctccctgctcccagctgccctcccagctttgatctctttgcctctggggcagtgctggacaggtgactttcatgatgcaaatcagggtcggcgggctgtctgcccaggctttgatctcctacctaagagaaggctggcaaggaackccatgggccccagccccaggttctctgtaaccttaggcgaggtggagcctgtggaaggactgttcttttgtctttgtgaacagcaggagccgttaaactacctgagttccagtaatgtacaccatgtgaagtgttggaggagctagacaggagagggcatcttgtttaacagatatctatttatcttattcaaatataggttaactagctaagtttagaacaaggccaaggcattgagaaataatagattctccacctgtcatactgggggcttcttttcttgactctgataaaagctatgcatactctccctttccccaatatttgtttttccttcttttgccatcgctattgatgcctagccatggttctggggtagagaggaagaaggacatgacatagcggaagtgagagttcttccctaagcacagtacaggctgaccaggaaggggaggtaaaagcaattctcagacgttgcatttctggagcttacagggagaaaaaggaagatagagggaggagaggcagggagagacataaatgtcttcatctcctgatgaccaggaatctgatgagtaacgcttggtgctggggatctgatgctcttctgcttcatatttcagactctcagagtagataattttacaggctgcctttattagtgtgaatagagttaggttcatgaacataaattcttacattgtttttatatttcttattacattacagaattgtaaaaaccttgttagtgcaagtaattattcatagactagcttccggaaacctctgtcctagactctctactcactaggtttctatttctgtcttgttccagttggactttagttggtttgtttatgtaataaggaaaggagatcccctcaaattgcttcaaataaaagaatgctgttttaaagatagatatggctctgttgagggctagaaatcttgggcaccaatatctgtcttggagagtgtcttctctccatctatccaatat

SEQ ID NO: 205 - DNA, 304 bp, homo sapiens; identical to SEQ ID NO: 178

SEQ ID NO: 206 - DNA, 377 bp, homo sapiens
  misc_feature 58, 203, 254: n = A,T,C or G
gatcttgccggaaatagatacccttcccctgcttcccgctgtgaagaagctgtttctntctctctctctctctctctctctctctctctgtgtgtgtgtgtgtgtgtgtgtgtgtagatagaaagagaagagggggagattaattgagagagagaaggggagaatgaacattggaatccaatgaggaaatgtccttgtaagtncctatcccatccgtagagttgggcgaggtaaagtaggttcctgtgcttttnaaaggcctgatggtctgaatctaaggagtcttccacagaagacctgtcatgagaagctgtcgggaagtccagatttaagaagctcatgcataatcatgctcgccccttggtgaagctttctgg

SEQ ID NO: 207 - DNA, 360 bp, homo sapiens; identical to SEQ ID NO: 18
  misc_feature 33, 36, 72, 281, 311: n = A,T,C or G

SEQ ID NO: 208 - DNA, 370 bp, homo sapiens
  misc_feature 97, 267, 274, 347: n = A,T,C or G
tattgaaggcacaagagtgtgaatgtggagccctttgccttcatccacaattgaaaatatgttatttgtgttaggtaactacctctgttcatcctanactggctctaacttggagatgacgttgaattcttttcaggatggacttggtgccgtgtgtgtgtgtgtgtgtgtgtgtgtgtgtgtgtgtgtgtgtgtatgtatgtgtatgtaaaacagagaaagatagtggtccagaggccaacacacctggaatctatttgtgagggnccctgcntcagtccacgaattgggccattcatttatttctcagtaagtgaacatctgggattcagtttgaaacgccaatnagtttggatgggatttcaaagct

SEQ ID NO: 209 - DNA, 278 bp, homo sapiens; identical to SEQ ID NO: 21

SEQ ID NO: 210 - DNA, 144 bp, homo sapiens
acttggcaccaaccaaagacctgaaaaagtattttagtcactcacattcagccctgcctcagaccccaagcatcatcatcatcatcatcatcatcatcatcatcatcatcgctattatttatggagctgccattacatgctagg

SEQ ID NO: 211 - DNA, 239 bp, homo sapiens
aatgcaggaatccaggaagaattttaagtggcatgatccaattctcattttagaaatactaccctggaggaagaagaagagaatgaacagcaagaggaacattatctttcaataagctatgtgtattattggatggagatgtgtgtgtgtgtgtgtgtgtgtgtgtgtgtgtgtgtgtgtgtgtatctatctgtctatatgtatgtgtatgtatatttaaaatgtgttggccaccagtg

SEQ ID NO: 212 - DNA, 245 bp, homo sapiens
atttgagccagtgtgcaaggaagacagtgtctgacatatcaaaagccctcaataaatggtaaatgttcatattatcaccaccaccaccaccaccaatgtttccacacactccaggaccttttaaccaggtgacttgcagacatgcccctgtgccggccgtgcccctgccaggctccctggcatcatgttgacttctgtattgctagaaatatattgtgtttagtcacatgtttgcaaatgacaga

SEQ ID NO: 213 - DNA, 148 bp, homo sapiens
gccatagtccgacaaggtcaaatatccttgtcatctgattcctgagcaaactgtttttatttttccactaaatcacatcatcttaaaacaaaacaaaacaaaacaaaacaaaacaaaaacaaaaactctactgctggcaaatgagaaa

SEQ ID NO: 214 - DNA, 171 bp, homo sapiens
ccataatccacccagttgctccagccaaaaacctaagactctttcttttctgatttctctcttcacacacacacacacacacacacacacacacacacacacatgttgtcctgcagctagccatcaacaagccaggttgaatctaactccttacctgatccctcaaggtcg

SEQ ID NO: 215 - DNA, 126 bp, homo sapiens
ctgctccattactccattcaaagtttgtacatccctatgtgaggtaagggtgtgtgtgtgtgtgtgtgtgtgtgtgtatgtgagtgaaatagaatgggatgggaaattgttcctcgatcccagtct

SEQ ID NO: 216 - DNA, 379 bp, homo sapiens
gttgtggccaccattctcattcccagtggttgcatttaatgcctacttgtgcagccaaacactgcatataggctctgggataaattgggaaacatgaaacacatgtcagtgtgtgcacttacgaatgagttctgaattaggaatatatatttctatatgtctatacacacacacacacacacacacacacacacacagagactatatacataaatttattttaaaagggcactttgctggaacaagaacaggcaagggttggctggtattccaatcatgcagtggtctcgcttgccttctctaggacacacctgcactttgtcaggtctcctcttgctgtgtgccccatctctctggctcagtcgccctagctgacttt

SEQ ID NO: 217 - DNA, 252 bp, homo sapiens
tggtctgactgcctgaaatggatctggccagctctgaagttataaatgactattaacttgcatgtacattattatctgctgtgtgtgtgtgtgtgtgtgtgtgtgtgtgtgtgtgtgcacattcacatgcacgcataaatatgtgctttcttccaccctagatatgttttcttggagtctgagccctagtgtactaatatatacccttgtacaatcttctggggctccccagagacccatgcccttgacttt

SEQ ID NO: 218 - DNA, 387 bp, homo sapiens
aaacatgtaaactggatgggagagtctaatacactttacctttctttctttctttcttttttttgagacagaattttgctctcattgcccaggctagagtgcaatggtgtgatcttggctcactgcaacctccgcctcccaggttcaagtgattctcctatctcagcctcccaagtagctgggattacagacacccaccaccatgcccagctaatttttttgtatttttagtagagatgggtttcaccgtgttggccaggctggtctcaaactcctgacctcaggtgatccaaccgcctcagcctcccaaagtgctgggattacaggcgtgagccactgcgcccagccaacagtctacctttctgaagaaccatgaggaccaatggt

SEQ ID NO: 219 - DNA, 211 bp, homo sapiens
aagagaaaggcgggaaacagaacagcctcccataaatcattatttgtctggggaaaaagtctctgacagatatgtggggtaccactgtgtgtgtgtgtatgtgtgtgtgtgtgtgtgtgtgtgttgtggggtggggggtgtggtttgatttccaaggcagaatttcactgtctgatcctgtctggagggcagaatgcttgtgctctccaca

SEQ ID NO: 220 - DNA, 414 bp, homo sapiens
tttgggctgatatagactgggtagttcataagcaacaaaatttatttctcagtgttttttgtttgtttgtttgtttgtttgtttgagatggagtcttgctctgtcacccaggctggagtacaatggtgcgatcttggctcactgcaacctctacctcctgggttcaagtgattctcctgcctcagcctcccaagtagctgggactacaggtgtgtgtgccaccacacccagctaatctttgtatttttagtagagacagggtttcaccgtgttgaccaagctggtcttgagctcctgacttcagatgattcaccggccttggcctcccaaagggctgggattacagccatgagccgctgcgcgtggcctatttcaaacagttctagacactggaagttccagatcaggatgcca

SEQ ID NO: 221 - DNA, 192 bp, homo sapiens
gcagggaccagagttggtaaaatatgcagatgtggaacctcaggttatggagggcctactgtacgtgtgtgtgtgtgtgtgtgtgtgtgtatatatagttaacatttgcagtgcacagatattttcatccccttccctgaagatgaggaggtgaagatggctacacaacagtctcatggcaggttagctggt

SEQ ID NO: 222 - DNA, 390 bp, homo sapiens
ctttgtttcctcacaatccttttttaaaaatcttatttgtaaatcttttttatacatctttatttttccaggtttattgatatataattgaggaattgtataaatgtaggttgtaaaacatgatgtttttatatgtatacattgtgaagtgattaccacaatcaagttaattaacacctatcatctcattcattacctttgtgtgtgtgtgtgtgtgtgtgtgtgtatgtagaacacttgagatctactcttttagcaaatttcaagtatacaatacattattattcatatctcttgttttattgtcctcttttccctttgtggctattttcatataaacataaaattgtgtagaagcctggagaatcatctaacccaggcaggcaaata

SEQ ID NO: 223 - DNA, 167 bp, homo sapiens
tctggaaagcaggaagagaaaactgacatttaagagagagagagaaagagagagagagagagaatgtgtgtgtgtgtgtgtgtgtgtgtgtgtgtgtgtgtgtgtgtgtgtgtgtgtatgggtggatatgaatacatttcaggagagcacaacaggagggtggtctt

SEQ ID NO: 224 - DNA, 152 bp, homo sapiens
agggacattgaaggctatgccaaaaggcttagaaacatactagcacatgataagtaaagatgaatgaggtattattattattattattattattattgttatttctaaagtaagattttctggattagccccacagaggagagtcagaggct

SEQ ID NO: 225 - DNA, 133 bp, homo sapiens
tcagctctttgtgcttggagagttgtgtgtgtgtgtgtgtgtgtgtgtgagagagagagagagagagagagagagaagagggggaaagagagagaaaatctttaaattttaattggtctgcaatggaagattt

SEQ ID NO: 226 - DNA, 245 bp, homo sapiens
cttgagtgattcagtccctttgtatcatgccacaaagattatgttcactccatgagtgtgtcataaagctttgagatatcaagagtgaaaacataaccaacctgcctgcctgcctgcctgcctgcctgccttccttcccacaaaacattctgtattgtgcaagcttctctgtaataccaggcaggcagacctcaaagtttttgcgaggcattttatgacttttatccttctccctcatccactca

SEQ ID NO: 227 - DNA, 184 bp, homo sapiens
catagacgagcctggagtgcactgtgttaagtgaaataaaccagacaaagaaagaaaaagattgcattgtttcaagtatatgtggaatctaaaaacaaacaaacaaacaaaaacccaactgtacagaaatagagaacaaaacagtgattaccaggcaggggatagctagggaggagatgggaga

SEQ ID NO: 228 - DNA, 154 bp, homo sapiens
actgctcctctccctcatcatcatcacggcccaagagtgatgaataaggagagagagagagagagagagagagagaagaatttatttgactaagtacgctttacatttttactcattggctttagtccatctcttaggtcaaacatcccatgcc

SEQ ID NO: 229 - DNA, 255 bp, homo sapiens
tgatgtggtgtggtgtggtatggggggtgtgtgtgtgtgtgtgtgtgtgtgtgtgtgtgtgtgtgtgttgtatgaaattttccaatttttaaaacagaggaggattgaaaaaacacatatatgtggcatgacgcaaaatgctgcaataaggattccatcctcaggctatcaaatgggcacctctgacctgttgtgtactgaatagttcagtgtttcttgacaagatgatgtactcagaaggccctgaatgtcaag

SEQ ID NO: 230 - DNA, 251 bp, homo sapiens
aagctcgggtacttcctcctacacattaccttgttggaatgtgtgtgtgtgtgtgtgtgtgtgtgtgtgtgtgtgtgtgtgtgtcaggatcttgctctgtctcccaggctggaatgcagcggtgcaatcacagctcacagcagcctcgacctcccaggctcaagtgatcctcccacctcagcctcctgcatagctaggactacaggcgtgcaccaccacactcagctaccttgttggatttaattggcacc

SEQ ID NO: 231 - DNA, 335 bp, homo sapiens
tttaaaggaagccagtcaggattcctggccatgtcctacacacacacacacacacacacacacacacacacacacacacacacacacacaaagtgggatgaggggtagaaagtgtggtggaggaccaaggagcaccacaaatctggtagatttgagcaaaatgaggctgaagagaattgaatcaggctaattaaccaggcgttggcaatagtgattatttttcaaggagaggtaagtgacagaaatccccacttccaggcccaattaccatgtcatcaagcgctaggctctgcctcctggatttctgtgcttggcgtaaagggctgcaggagttg

SEQ ID NO: 232 - DNA, 230 bp, homo sapiens
ggcagaggcagagtgagctacacacacacacacacacacatacacacacacacacccttacacacccttaaatgttccttattaattatactggcttgcattgaactgaggtgtaagtggtcgatttggactcctttcctaaaagaagggtttgagaggggaggagtgagagagatggagggtactgggtcccaacccgcaggaaggagagaagcaggacatgggaagag

SEQ ID NO: 233 - DNA, 137 bp, homo sapiens
caatggtgggccaaagacgcagggaataatgaagggagaaagaaaagaaaggaagatggaggaaaacgaggcaactggaagaaggaaggaaggaaagaaggaagggatggaggggatgaagagaagggagagaggga

SEQ ID NO: 234 - DNA, 265 bp, homo sapiens
gtctgcaggccagaactcaccggtgggctaccagtttgcaagttcgtctctgctgttcccagtaaagagctagttgtacgttttgtttgtttgtttgtttgtttgtttttgagcatggagctgaactgagcaaaacaggggcagggagtcctcctggtgcaagggatgaaggaaaagagaccccatgcccaatactcctctttacatgccctcaccatgaccacatccaaccacccgggttgcccctctgtttggcccattcttc

SEQ ID NO: 235 - DNA, 370 bp, homo sapiens
ttcgagttgtcccacctttccctactaaaccagtgtatcaatgtgcatcttacatgtattgactgatgtcttatgtctccctaaaatgtataaaaccaaactatagcttgactactctgggcacatgttcttaggatctcccggggctgtggcactcctatttggctcagaataaatctcttcaaatattttacagagtttgactcttcttgttgacaacttccagttctctctcattctctctctgtcactctctctctctctctctctctctctctcacacacacacacagacacacacacaacacacacatacataagccaactcaatcatcgttatatctgtaccctgagaggctaatcccagagg

SEQ ID NO: 236 - protein, 1523 aa, homo sapiens
MAPGWAGVGAAVRARLALALALASVLSGPPAVACPTKCTCSAASVDCHGLGLRAVPRGIPRNAERLDLDRNNITRITKMDFAGLKNLRVLHLEDNQVSVIERGAFQDLKQLERLRLNKNKLQVLPELLFQSTPKLTRLDLSENQIQGIPRKAFRGITDVKNLQLDNNHISCIEDGAFRALRDLEILTLNNNNISRILVTSFNHMPKIRTLRLHSNHLYCDCHLAWLSDWLRQRRTVGQFTLCMAPVHLRGFNVADVQKKEYVCPAPHSEPPSCNANSISCPSPCTCSNNIVDCRGKGLMEIPANLPEGIVEIRLEQNSIKAIPAGAFTQYKKLKRIDISKNQISDIAPDAFQGLKSLTSLVLYGNKITEIAKGLFDGLVSLQLLLLNANKINCLRVNTFQDLQNLNLLSLYDNKLQTISKGLFAPLQSIQTLHLAQNPFVCDCHLKWLADYLQDNPIETSGARCSSPRRLANKRISQIKSKKFRCSGSEDYRSRFSSECFMDLVCPEKCRCEGTIVDCSNQKLVRIPSHLPEYVTDLRLNDNEVSVLEATGIFKKLPNLRKINLSNNKIKEVREGAFDGAASVQELMLTGNQLETVHGRVFRGLSGLKTLMLRSNLIGCVSNDTFAGLSSVRLLSLYDNRITTITPGAFTTLVSLSTINLLSNPFNCNCHLAWLGKWLRKRRIVSGNPRCQKPFFLKEIPIQDVAIQDFTCDGNEESSCQLSPRCPEQCTCMETVVRCSNKGLRALPRGMPKDVTELYLEGNHLTAVPRELSALRHLTLIDLSNNSISMLTNYTFSNMSHLSTLILSYNRLRCIPVHAFNGLRSLRVLTLHGNDISSVPEGSFNDLTSLSHLALGTNPLHCDCSLRWLSEWVKAGYKEPGIARCSSPEPMADRLLLTTPTHRFQCKGPVDINIVAKCNACLSSPCKNNGTCTQDPVELYRCACPYSYKGKDCTVPINTCIQNPCQHGGTCHLSDSHKDGFSCSCPLGFEGQRCEINPDDCEDNDCENNATCVDGINNYVCICPPNYTGELCDEVIDHCVPELNLCQHEAKCIPLDKGFSCECVPGYSGKLCETDNDDCVAHKCRHGAQCVDTINGYTCTCPQGFSGPFCEHPPPMVLLQTSPCDQYECQNGAQCIVVQQEPTCRCPPGFAGPRCEKLITVNFVGKDSYVELASAKVRPQANISLQVATDKDNGILLYKGDNDPLALELYQGHVRLVYDSLSSPPTTVYSVETVNDGQFHSVELVTLNQTLNLVVDKGTPKSLGKLQKQPAVGINSPLYLGGIPTSTGLSALRQGTDRPLGGFHGCIHEVRINNELQDFKALPPQSLGVSPGCKSCTVCKHGLCRSVEKDSVVCECRPGWTGPLCDQEARDPCLGHRCHHGKCVATGTSYMCKCAEGYGGDLCDNKNDSANACSAFKCHHGQCHISDQGEPYCLCQPGFSGEHCQQENPCLGQVVREVIRRQKGYASCATASKVPIMECRGGCGPQCCQPTRSKRRKYVFQCTDGSSFVEEVERHLECGCLACS

1. A method of diagnosing a susceptibility to Type II diabetes in an individual, comprising detecting a polymorphism in a SLIT-3 nucleic acid, wherein the presence of the polymorphism in the nucleic acid is indicative of a susceptibility to Type II diabetes.

2. A method of diagnosing a susceptibility to Type II diabetes comprising detecting an alteration in the expression or composition of a polypeptide encoded by SLIT-3 nucleic acid in a test sample, in comparison with the expression or composition of a polypeptide encoded by a SLIT-3 nucleic acid in a control sample, wherein the presence of an alteration in expression or composition of the polypeptide in the test sample is indicative of a susceptibility to Type II diabetes.

3. The method of claim 1, wherein the polymorphism in the SLIT-3 nucleic acid is indicated by detecting the presence of a least one of the polymorphisms indicated in FIG. 11.

4. An isolated nucleic acid molecule comprising a SLIT-3 nucleic acid, wherein the SLIT-3 nucleic acid has a nucleotide sequence selected from the group of nucleic acid sequences as shown in FIG. 10, or the complements of the group of nucleic acid sequences as shown in FIG. 10, wherein the nucleotide sequence contains a polymorphism.

5. An isolated nucleic acid molecule which hybridizes under high stringency conditions to a nucleotide sequence selected from the group of nucleic acid sequences as shown in FIG. 10, or the complements of the group of nucleic acid sequences as shown in FIG. 10, wherein the nucleotide sequence contains a polymorphism.

6. A method for assaying for the presence of a first nucleic acid molecule in a sample, comprising contacting said sample with a second nucleic acid molecule, where the second nucleic acid molecule comprises a nucleotide sequence selected from the group consisting of: nucleic acid sequences as shown in FIG. 10 and the complement of the nucleic acid sequences as shown in FIG. 10, wherein the nucleotide sequence contains a polymorphism and hybridizes to the first nucleic acid under high stringency conditions.

7. A vector comprising an isolated nucleic acid molecule selected from the group consisting of:
a) nucleic acid sequences as shown in FIG. 10; and
b) complement of one of the nucleic acid sequences are shown in FIG. 10; and
wherein the nucleic acid molecule contains a polymorphism and is operably linked to a regulatory sequence.

8. A recombinant host cell comprising the vector of claim 7.

9. A method for producing a polypeptide encoded by an isolated nucleic acid molecule having a polymorphism, comprising culturing the recombinant host cell of claim 8 under conditions suitable for expression of the nucleic acid molecule.

10. A method of assaying for the presence of a polypeptide encoded by an isolated nucleic acid molecule according to claim 4 in a sample, the method comprising contacting the sample with an antibody which specifically binds to the encoded polypeptide.

11. A method of identifying an agent that alters expression of a SLIT-3 nucleic acid, comprising:
a) contacting a solution containing a nucleic acid comprising the promoter region of the SLIT-3 nucleic acid operably linked to a reporter gene with an agent to be tested;
b) assessing the level of expression of the reporter gene; and
c) comparing the level of expression with a level of expression of the reporter gene in the absence of the agent; wherein if the level of expression of the reporter gene in the presence of the agent differs, by an amount that is statistically significant, from the level of expression in the absence of the agent, then the agent is an agent that alters expression of the SLIT-3 nucleic acid.

12. An agent that alters expression of the SLIT-3 nucleic acid, identifiable according to the method of claim 11.

13. A method of identifying an agent that alters expression of a SLIT-3 nucleic acid, comprising:
a) contacting a solution containing a nucleic acid of claim 4 or a derivative or fragment thereof with an agent to be tested;
b) comparing expression with expression of the nucleic acid, derivative or fragment in the absence of the agent;
wherein if expression of the nucleotide, derivative or fragment in the presence of the agent differs, by an amount that is statistically significant, from the expression in the absence of the agent, then the agent is an agent that alters expression of the SLIT-3 nucleic acid.

14. The method of claim 13, wherein the expression of the nucleotide, derivative or fragment in the presence of the agent comprises expression of one or more splicing variant(s) that differ in kind or in quantity from the expression of one or more splicing variant(s) the absence of the agent.

15. An agent that alters expression of a SLIT-3 nucleic acid, identifiable according to the method of claim 14.

16. An agent that alters expression of a SLIT-3 nucleic acid, selected from the group consisting of: antisense nucleic acid to a SLIT-3 nucleic acid; a SLIT-3 polypeptide; a SLIT-3 nucleic acid receptor; a SLIT-3 binding agent; a peptidomimetic; a fusion protein; a prodrug thereof; an antibody; and a ribozyme.

17. A method of altering expression of a SLIT-3 nucleic acid, comprising contacting a cell containing a SLIT-3 nucleic acid with an agent of claim 16.

18. A method of identifying a polypeptide which interacts with a SLIT-3 polypeptide comprising a polymorphism indicated in FIG. 11, comprising employing a yeast two-hybrid system using a first vector which comprises a nucleic acid encoding a DNA binding domain and a SLIT-3 polypeptide, splicing variant, or a fragment or derivative thereof, and a second vector which comprises a nucleic acid encoding a transcription activation domain and a nucleic acid encoding a test polypeptide, wherein if transcriptional activation occurs in the yeast two-hybrid system, the test polypeptide is a polypeptide which interacts with a SLIT-3 polypeptide.

19. A Type II diabetes therapeutic agent selected from the group consisting of: a SLIT-3 nucleic acid or fragment or derivative thereof; a member of the Robo family nucleic acid or fragment or derivative thereof; a polypeptide encoded by a SLIT-3 nucleic acid; a polypeptide encoded by a member of the Robo family nucleic acid; a SLIT-3 receptor; receptor for a member of the Robo family; a SLIT-3 nucleic acid binding agent; a Robo family member nucleic acid binding agent; a peptidomimetic; a fusion protein; a prodrug; an antibody; an agent that alters SLIT-3 nucleic acid expression; an agent that alters a Robo family member nucleic acid expression; an agent that alters activity of a polypeptide encoded by a SLIT-3 nucleic acid; an agent that alters activity of a polypeptide encoded nucleic acid of a Robo family member; an agent that alters posttranscriptional processing of a polypeptide encoded by a SLIT-3 nucleic acid; an agent that alters posttranscriptional processing of a polypeptide encoded by a nucleic acid of a Robo family member; an agent that alters interaction of a SLIT-3 nucleic acid with a SLIT-3 binding agent; an agent that alters interaction of a nucleic acid of a member of the Robo family with a Robo family binding agent; an agent that alters interaction of a SLIT-3 nucleic acid with a Robo family member; an agent that alters transcription of splicing variants encoded by a SLIT-3 nucleic acid; an agent that alters transcription of splicing variants encoded by a nucleic acid of a Robo family member; and a ribozyme.

20. A pharmaceutical composition comprising a Type II diabetes therapeutic agent of claim 19.

21. The pharmaceutical composition of claim 20, wherein the Type II diabetes therapeutic agent is selected from one or more of the group consisting of an isolated nucleic acid molecule comprising a SLIT-3 nucleic acid or fragment or derivative thereof, and a polypeptide encoded by the SLIT-3 nucleic acid.

22. (canceled)

23. A method of treating a disease or condition associated with SLIT-3 in an individual, comprising administering a Type II diabetes therapeutic agent to the individual, in a therapeutically effective amount.

24. The method of claim 23, wherein the Type II diabetes therapeutic agent is a SLIT-3 nucleic acid agonist or a SLIT-3 nucleic acid antagonist.

25. (canceled)

26. (canceled)

27. A method for assaying a sample for the presence of a SLIT-3 nucleic acid, comprising:
a) contacting said sample with a nucleic acid comprising a contiguous nucleotide sequence which is at least partially complementary to a part of the sequence of said SLIT-3 gene under conditions appropriate for hybridization, and
b) assessing whether hybridization has occurred between a SLIT-3 gene nucleic acid and said nucleic acid comprising a contiguous nucleotide sequence which is at least partially complementary to a part of the sequence of said SLIT-3 nucleic acid;
wherein if hybridization has occurred, a SLIT-3 nucleic acid is present in the nucleic acid.

28. The method of claim 27, wherein said nucleic acid comprising a contiguous nucleotide sequence is completely complementary to a part of the sequence of said SLIT-3 nucleic acid.

29. The method of claim 27, further comprising amplification of at least part of said SLIT-3 nucleic acid.

30. The method of claim 27, wherein said contiguous nucleotide sequence is 100 or fewer nucleotides in length and is either: a) at least 80% identical to a contiguous sequence of nucleotides in one of the nucleic acid sequences as shown in FIG. 10; b) at least 80% identical to the complement of a contiguous sequence of nucleotides in one of the nucleic acid sequences as shown in FIG. 10; or c) capable of selectively hybridizing to said SLIT-3 nucleic acid.

31. A reagent for assaying a sample for the presence of a SLIT-3 nucleic acid, said reagent comprising a nucleic acid comprising a contiguous nucleotide sequence which is at least partially complementary to a part of the nucleotide sequence of said SLIT-3 nucleic acid.

32. The reagent of claim 31, wherein the nucleic acid comprises a contiguous nucleotide sequence, which is completely complementary to a part of the nucleotide sequence of said SLIT-3 nucleic acid.

33. A reagent kit for assaying a sample for the presence of a SLIT-3 nucleic acid, comprising in separate containers:
a) one or more labeled nucleic acids comprising a contiguous nucleotide sequence which is at least partially complementary to a part of the nucleotide sequence of said SLIT-3 nucleic acid, and
b) reagents for detection of said label.

34. The reagent kit of claim 33, wherein the labeled nucleic acid comprises a contiguous nucleotide sequences which is completely complementary to a part of the nucleotide sequence of said SLIT-3 nucleic acid.

35. A reagent kit for assaying a sample for the presence of a SLIT-3 nucleic acid, comprising one or more nucleic acids comprising a contiguous nucleic acid sequence which is at least partially complementary to a part of the nucleic acid sequence of said SLIT-3 nucleic acid, and which is capable of acting as a primer for said SLIT-3 nucleic acid when maintained under conditions for primer extension.

36. The use of a nucleic acid which is 100 or fewer nucleotides in length and which is either:
a) at least 80% identical to a contiguous sequence of nucleotides in one of the nucleic acid sequences as shown in FIG. 10;
b) at least 80% identical to the complement of a contiguous sequence of nucleotides in one of the nucleic acid sequences as shown in FIG. 10; or
c) capable of selectively hybridizing to said SLIT-3 nucleic acid, for assaying a sample for the presence of a SLIT-3 nucleic acid.

37. The use of claim 36, wherein the SLIT-3 nucleic acid of (c) has at least one nucleotide difference from the first nucleic acid.

38. The use of a nucleic acid which is 100 or fewer nucleotides in length and which is either:
a) at least 80% identical to a contiguous sequence of nucleotides in one of the nucleic acid sequences as shown in FIG. 10;
b) at least 80% identical to the complement of a contiguous sequence of nucleotides in one of the nucleic acid sequences as shown in FIG. 10; or
c) capable of selectively hybridizing to said SLIT-3 nucleic acid; for diagnosing a susceptibility to a disease or condition associated with a SLIT-3.

39. A method of diagnosing a susceptibility to Type II diabetes in an individual, comprising determining the presence or absence in the individual of a haplotype shown in Table 2 or a haplotype shown in Table 5, at the 5q35 loci, wherein the presence of the haplotype is diagnostic of susceptibility to Type II diabetes.

40. The method of claim 39, wherein determining the presence or absence of the haplotype comprises enzymatic amplification of nucleic acid from the individual.

41. The method of claim 40, wherein determining the presence or absence of the haplotype further comprises electrophoretic analysis.

42. The method of claim 39, wherein determining the presence or absence of the haplotype further comprises an analysis selected from one or more of the group consisting of restriction fragment length polymorphism analysis and sequence analysis.

43. (canceled)

44. A method of diagnosing a susceptibility to Type II diabetes in an individual, comprising:
a) obtaining a nucleic acid sample from said individual; and
b) analyzing the nucleic acid sample for the presence or absence of a haplotype shown in Table 2 or shown in Table 5, at the 5q35 loci comprising a SLIT-3 gene, wherein the presence of the haplotype is diagnostic for a susceptibility to Type II diabetes.

45. A method of diagnosing a susceptibility to Type II diabetes in an individual, comprising determining the presence or absence in the individual of a haplotype comprising one or more markers and/or single nucleotide polymorphisms as shown in FIG. 11, in the locus on chromosome 5q35, wherein the presence of the haplotype is diagnostic of a susceptibility to Type II diabetes.

46. A method for the diagnosis and identification of a susceptibility to Type II diabetes in an individual, comprising: screening for an at-risk haplotype in the SLIT-3 nucleic acid that is more frequently present in an individual susceptible to Type II diabetes compared to an individual who is not susceptible to Type II diabetes wherein the at-risk haplotype increases the risk significantly.

47. The method of claim 46 wherein the significant increase is at least about 20%.

48. The method of claim 46 wherein the significant increase is identified as an odds ratio of at least about 1.2.

49. Use of a Type II diabetes therapeutic agent for the manufacture of a medicament for the treatment of a disease or condition associated with SLIT-3 in an individual.

50. The use of claim 49, wherein the Type II diabetes therapeutic agent is selected from one or more of the group consisting of a SLIT-3 nucleic acid agonist and a SLIT-3 nucleic acid antagonist.

51. (canceled)
